(19) United States
(12) Patent Application Publication
(10) Pub. No.: US 2008/0207542 A1
(43) Pub. Date: Aug. 28, 2008

(54) RNA inteference mediated inhibition of hepatitis C virus (HVC) gene expression using short interfering nucleic acid (siNA)

(75) Inventors: James McSwiggen, Boulder, CO (US); David Morrissey, Boulder, CO (US); Roberto Guerciolini, Boulder, CO (US); Chandra Vargeese, Broomfield, CO (US); Vasant Jadhav, Longmont, CO (US)

Correspondence Address: MCDONNELL, BOEHNEN, HULBERT AND BERGHOFF, LLP, 300 SOUTH WACKER DRIVE, SUITE 3100, CHICAGO, IL, 60606, US

(73) Assignee: Sirna Therapeutics, Inc., San Francisco, CA (US)

(21) Appl. No.: 11/510,872

(22) Filed: Aug. 25, 2006

Related U.S. Application Data
(63) Continuation-in-part of application No. 11/311,826, filed on Dec. 19, 2005, now abandoned.
Application No. 11/311,826 is a continuation-in-part of application No. 10/942,560, filed on Sep. 15, 2004, now abandoned.
Application No. 10/942,560 is a continuation-in-part of application No. 10/667,271, filed on Sep. 16, 2003.
Application No. 10/667,271 is a continuation-in-part of application No. PCT/US03/05043, filed on Feb. 20, 2003.
Application No. PCT/US03/05043 is a continuation-in-part of application No. PCT/US02/09187, filed on Mar. 26, 2002.
(60) Provisional application No. 60/401,104, filed on Aug. 5, 2002.

(51) Int. Cl. A61K 31/713

(52) U.S. Cl. 514/44

(57) ABSTRACT

The present invention relates to compounds, compositions, and methods for the study, diagnosis, and treatment of traits, diseases and conditions that respond to the modulation of gene expression and/or activity. The present invention is also directed to compounds, compositions, and methods relating to traits, diseases and conditions that respond to the modulation of expression and/or activity of genes involved in gene expression pathways or other cellular processes that mediate the maintenance or development of such traits, diseases and conditions. Specifically, the invention relates to double stranded nucleic acid molecules including small nucleic acid molecules, such as short interfering nucleic acid (siNA), short interfering RNA (siRNA), double-stranded RNA (dsRNA), micro-RNA (miRNA), and short hairpin RNA (shRNA) molecules capable of mediating RNA interference (RNAi) against gene expression, including cocktails of such small nucleic acid molecules and lipid nanoparticle (LNP) formulations of such small nucleic acid molecules. The present invention also relates to small nucleic acid molecules, such as siNA, siRNA, and others that can inhibit the function of endogenous RNA molecules, such as endogenous micro-RNA (miRNA) (e.g, miRNA inhibitors) or endogenous short interfering RNA (siRNA), (e.g., siRNA inhibitors) or that can inhibit the function of RISC (e.g., RISC inhibitors), to modulate gene expression by interfering with the regulatory function of such endogenous RNAs or proteins associated with such endogenous RNAs (e.g., RISC), including cocktails of such small nucleic acid molecules and lipid nanoparticle (LNP) formulations of such small nucleic acid molecules. Such small nucleic acid molecules and are useful, for example, in providing compositions to prevent, inhibit, or reduce diseases, traits and conditions that are associated with gene expression or activity in a subject or organism.

[0001] This invention is a continuation-in-part of U.S. patent application Ser. No. 11/311,826, filed Dec. 19, 2005, which is a continuation-in-part of U.S. patent application Ser. No. 10/942,560, filed Sep. 15, 2004, which is a continuation-in-part of U.S. patent application Ser. No. 10/667,271, filed Sep. 16, 2003, which is a continuation-in-part of International Patent Application No. PCT/US03/05043, filed Feb. 20, 2003, which is a continuation-in-part of McSwiggen PCT/US02/09187, filed Mar. 26, 2002 and claims the benefit of McSwiggen U.S. Ser. No. 60/401,104, filed Aug. 5, 2002. This application is also continuation-in-part of U.S. patent application Ser. No. TBD, filed Aug. 17, 2006, which is a continuation-in-part of U.S. patent application Ser. No. 11/299,254, filed Dec. 8, 2005, which is a continuation-in-part of U.S. patent application Ser. No. 11/234,730, filed Sep. 23, 2005, which is a continuation-in-part of U.S. patent application Ser. No. 11/205,646, filed Aug. 17, 2005, which is a continuation-in-part of U.S. patent application Ser. No. 11/098,303, filed Apr. 4, 2005, which is a continuation-in-part of U.S. patent application Ser. No. 10/923,536, filed Aug. 20, 2004, which is a continuation-in-part of International Patent Application No. PCT/US04/16390, filed May 24, 2004, which is a continuation-in-part of U.S. patent application Ser. No. 10/826,966, filed Apr. 16, 2004, which is continuation-in-part of U.S. patent application Ser. No. 10/757,803, filed Jan. 14, 2004, which is a continuation-in-part of U.S. patent application Ser. No. 10/720,448, filed Nov. 24, 2003, which is a continuation-in-part of U.S. patent application Ser. No. 10/693,059, filed Oct. 23, 2003, which is a continuation-in-part of U.S. patent application Ser. No. 10/444,853, filed May 23, 2003, which is a continuation-in-part of International Patent Application No. PCT/US03/05346, filed Feb. 20, 2003, and a continuation-in-part of International Patent Application No. PCT/US03/05028, filed Feb. 20, 2003, both of which claim the benefit of U.S. Provisional Application No. 60/358,580 filed Feb. 20, 2002, U.S. Provisional Application No. 60/363,124 filed Mar. 11, 2002, U.S. Provisional Application No. 60/386,782 filed Jun. 6, 2002, U.S. Provisional Application No. 60/406,784 filed Aug. 29, 2002, U.S. Provisional Application No. 60/408,378 filed Sep. 5, 2002, U.S. Provisional Application No. 60/409,293 filed Sep. 9, 2002, and U.S. Provisional Application No. 60/440,129 filed Jan. 15, 2003. This application is also a continuation-in-part of International Patent Application No. PCT/US04/13456, filed Apr. 30, 2004, which is a continuation-in-part of U.S. patent application Ser. No. 10/780,447, filed Feb. 13, 2004, which is a continuation-in-part of U.S. patent application Ser. No. 10/427,160, filed Apr. 30, 2003, which is a continuation-in-part of International Patent Application No. PCT/US02/15876 filed May 17, 2002, which claims the benefit of U.S. Provisional Application No. 60/292,217, filed May 18, 2001, U.S. Provisional Application No. 60/362,016, filed Mar. 6, 2002, U.S. Provisional Application No. 60/306,883, filed Jul. 20, 2001, and U.S. Provisional Application No. 60/311,865, filed Aug. 13, 2001. This application is also a continuation-in-part of U.S. patent application Ser. No. 10/727,780 filed Dec. 3, 2003. This application is also a continuation-in-part of International Patent Application No. PCT/US05/04270, filed Feb. 9, 2005 which claims the benefit of U.S. Provisional Application No. 60/543,480, filed Feb. 10, 2004. This application is also a continuation-in-part of U.S. patent application Ser. No. 11/353,630, filed Feb. 14, 2006, which claims the benefit of U.S. Provisional Patent Application No. 60/652,787 filed Feb. 14, 2005, U.S. Provisional Patent Application No. 60/678,531 filed May 6, 2005, U.S. Provisional Patent Application No. 60/703,946, filed Jul. 29, 2005, and U.S. Provisional Patent Application No. 60/737,024, filed Nov. 15, 2005. The instant application claims the benefit of all the listed applications, which are hereby incorporated by reference herein in their entireties, including the drawings.

### FIELD OF THE INVENTION

[0002] The present invention relates to compounds, compositions, and methods for the study, diagnosis, and treatment of traits, diseases and conditions that respond to the modulation of hepatitis C virus (HCV) gene expression and/or activity. The present invention is also directed to compounds, compositions, and methods relating to traits, diseases and conditions that respond to the modulation of expression and/or activity of genes involved in hepatitis C virus (HCV) gene expression pathways or other cellular processes that mediate the maintenance or development of such traits, diseases and conditions. Specifically, the invention relates to double stranded nucleic acid molecules including small nucleic acid molecules, such as short interfering nucleic acid (siNA), short interfering RNA (siRNA), double-stranded RNA (dsRNA), micro-RNA (miRNA), and short hairpin RNA (shRNA) molecules capable of mediating RNA interference (RNAi) against hepatitis C virus (HCV) gene expression, including cocktails of such small nucleic acid molecules and lipid nanoparticle (LNP) formulations of such small nucleic acid molecules. The present invention also relates to small nucleic acid molecules, such as siNA, siRNA, and others that can inhibit the function of endogenous RNA molecules, such as endogenous micro-RNA (miRNA) (e.g, miRNA inhibitors) or endogenous short interfering RNA (siRNA), (e.g., siRNA inhibitors) or that can inhibit the function of RISC (e.g., RISC inhibitors), to modulate hepatitis C virus (HCV) gene expression by interfering with the regulatory function of such endogenous RNAs or proteins associated with such endogenous RNAs (e.g., RISC), including cocktails of such small nucleic acid molecules and lipid nanoparticle (LNP) formulations of such small nucleic acid molecules. Such small nucleic acid molecules and formulations are useful, for example, in providing compositions to prevent, inhibit, or reduce HCV infection, liver failure, hepatocellular carcinoma, cirrhosis, and/or other disease states associated with HCV infection in a subject or organism.

### BACKGROUND OF THE INVENTION

[0003] The following is a discussion of relevant art pertaining to RNAi. The discussion is provided only for understanding of the invention that follows. The summary is not an admission that any of the work described below is prior art to the claimed invention.

[0004] RNA interference refers to the process of sequence-specific post-transcriptional gene silencing in animals mediated by short interfering RNAs (siRNAs) (Zamore et al., 2000, Cell, 101, 25-33; Fire et al., 1998, Nature, 391, 806; Hamilton et al., 1999, Science, 286, 950-951; Lin et al., 1999, Nature, 402, 128-129; Sharp, 1999, genes & Dev., 13:139-141; and Strauss, 1999, Science, 286, 886). The corresponding process in plants (Heifetz et al., International PCT Publication No. WO 99/61631) is commonly referred to as post-transcriptional gene silencing or RNA silencing and is also referred to as quelling in fungi. The process of post-transcriptional gene silencing is thought to be an evolutionarily-conserved cellular defense mechanism used to prevent the expression of foreign genes and is commonly shared by diverse flora and phyla (Fire et al., 1999, Trends genet., 15, 358). Such protection from foreign gene expression may have evolved in response to the production of double-stranded RNAs (dsRNAs) derived from viral infection or from the random integration of transposon elements into a host genome via a cellular response that specifically destroys homologous single-stranded RNA or viral genomic RNA. The presence of dsRNA in cells triggers the RNAi response through a mechanism that has yet to be fully characterized. This mechanism appears to be different from other known mechanisms involving double stranded RNA-specific ribonucleases, such as the interferon response that results from dsRNA-mediated activation of protein kinase PKR and 2′,5′-oligoadenylate synthetase resulting in non-specific cleavage of mRNA by ribonuclease L (see for example U.S. Pat. Nos. 6,107,094; 5,898,031; Clemens et al., 1997, J. Interferon & Cytokine Res., 17, 503-524; Adah et al., 2001, Curr. Med. Chem., 8, 1189).

[0005] The presence of long dsRNAs in cells stimulates the activity of a ribonuclease III enzyme referred to as dicer (Bass, 2000, Cell, 101, 235; Zamore et al., 2000, Cell, 101, 25-33; Hammond et al., 2000, Nature, 404, 293). Dicer is involved in the processing of the dsRNA into short pieces of dsRNA known as short interfering RNAs (siRNAs) (Zamore et al., 2000, Cell, 101, 25-33; Bass, 2000, Cell, 101, 235; Berstein et al., 2001, Nature, 409, 363). Short interfering RNAs derived from dicer activity are typically about 21 to about 23 nucleotides in length and comprise about 19 base pair duplexes (Zamore et al., 2000, Cell, 101, 25-33; Elbashir et al., 2001, genes Dev., 15, 188). Dicer has also been implicated in the excision of 21- and 22-nucleotide small temporal RNAs (stRNAs) from precursor RNA of conserved structure that are implicated in translational control (Hutvagner et al., 2001, Science, 293, 834). The RNAi response also features an endonuclease complex, commonly referred to as an RNA-induced silencing complex (RISC), which mediates cleavage of single-stranded RNA having sequence complementary to the antisense strand of the siRNA duplex. Cleavage of the target RNA takes place in the middle of the region complementary to the antisense strand of the siRNA duplex (Elbashir et al., 2001, genes Dev., 15, 188).

[0006] RNAi has been studied in a variety of systems. Fire et al., 1998, Nature, 391, 806, were the first to observe RNAi in C. elegans. Bahramian and Zarbl, 1999, Molecular and Cellular Biology, 19, 274-283 and Wianny and Goetz, 1999, Nature Cell Biol., 2, 70, describe RNAi mediated by dsRNA in mammalian systems. Hammond et al., 2000, Nature, 404, 293, describe RNAi in Drosophila cells transfected with dsRNA. Elbashir et al., 2001, Nature, 411, 494 and Tuschl et al., International PCT Publication No. WO 01/75164, describe RNAi induced by introduction of duplexes of synthetic 21-nucleotide RNAs in cultured mammalian cells including human embryonic kidney and HeLa cells. Recent work in Drosophila embryonic lysates (Elbashir et al., 2001, EMBO J, 20, 6877 and Tuschl et al., International PCT Publication No. WO 01/75164) has revealed certain requirements for siRNA length, structure, chemical composition, and sequence that are essential to mediate efficient RNAi activity. These studies have shown that 21-nucleotide siRNA duplexes are most active when containing 3′-terminal dinucleotide overhangs. Furthermore, complete substitution of one or both siRNA strands with 2′-deoxy (2′-H) or 2′-O-methyl nucleotides abolishes RNAi activity, whereas substitution of the 3′-terminal siRNA overhang nucleotides with 2′-deoxy nucleotides (2′-H) was shown to be tolerated. Single mismatch sequences in the center of the siRNA duplex were also shown to abolish RNAi activity. In addition, these studies also indicate that the position of the cleavage site in the target RNA is defined by the 5′-end of the siRNA guide sequence rather than the 3′-end of the guide sequence (Elbashir et al., 2001, EMBO J., 20, 6877). Other studies have indicated that a 5′-phosphate on the target-complementary strand of a siRNA duplex is required for siRNA activity and that ATP is utilized to maintain the 5′-phosphate moiety on the siRNA (Nykanen et al., 2001, Cell, 107, 309).

[0007] Studies have shown that replacing the 3′-terminal nucleotide overhanging segments of a 21-mer siRNA duplex having two-nucleotide 3′-overhangs with deoxyribonucleotides does not have an adverse effect on RNAi activity. Replacing up to four nucleotides on each end of the siRNA with deoxyribonucleotides has been reported to be well tolerated, whereas complete substitution with deoxyribonucleotides results in no RNAi activity (Elbashir et al., 2001, EMBO J., 20, 6877 and Tuschl et al., International PCT Publication No. WO 01/75164). In addition, Elbashir et al., supra, also report that substitution of siRNA with 2′-O-methyl nucleotides completely abolishes RNAi activity. Li et al., International PCT Publication No. WO 00/44914, and Beach et al., International PCT Publication No. WO 01/68836 preliminarily suggest that siRNA may include modifications to either the phosphate-sugar backbone or the nucleoside to include at least one of a nitrogen or sulfur heteroatom, however, neither application postulates to what extent such modifications would be tolerated in siRNA molecules, nor provides any further guidance or examples of such modified siRNA. Kreutzer et al., Canadian Patent Application No. 2,359,180, also describe certain chemical modifications for use in dsRNA constructs in order to counteract activation of double-stranded RNA-dependent protein kinase PKR, specifically 2′-amino or 2′-O-methyl nucleotides, and nucleotides containing a 2′-O or 4′-C methylene bridge. However, Kreutzer et al. similarly fails to provide examples or guidance as to what extent these modifications would be tolerated in dsRNA molecules.

[0008] Parrish et al., 2000, Molecular Cell, 6, 1077-1087, tested certain chemical modifications targeting the unc-22 gene in C. elegans using long (>25 nt) siRNA transcripts. The authors describe the introduction of thiophosphate residues into these siRNA transcripts by incorporating thiophosphate nucleotide analogs with T7 and T3 RNA polymerase and observed that RNAs with two phosphorothioate modified bases also had substantial decreases in effectiveness as RNAi. Further, Parrish et al. reported that phosphorothioate modification of more than two residues greatly destabilized the RNAs in vitro such that interference activities could not be assayed. Id. at 1081. The authors also tested certain modifications at the 2′-position of the nucleotide sugar in the long siRNA transcripts and found that substituting deoxynucleotides for ribonucleotides produced a substantial decrease in interference activity, especially in the case of Uridine to Thymidine and/or Cytidine to deoxy-Cytidine substitutions. Id. In addition, the authors tested certain base modifications, including substituting, in sense and antisense strands of the siRNA, 4-thiouracil, 5-bromouracil, 5-iodouracil, and 3-(aminoallyl)uracil for uracil, and inosine for guanosine. Whereas 4-thiouracil and 5-bromouracil substitution appeared to be tolerated, Parrish reported that inosine produced a substantial decrease in interference activity when incorporated in either strand. Parrish also reported that incorporation of 5-iodouracil and 3-(aminoallyl)uracil in the antisense strand resulted in a substantial decrease in RNAi activity as well.

[0009] The use of longer dsRNA has been described. For example, Beach et al., International PCT Publication No. WO 01/68836, describes specific methods for attenuating gene expression using endogenously-derived dsRNA. Tuschl et al., International PCT Publication No. WO 01/75164, describe a Drosophila in vitro RNAi system and the use of specific siRNA molecules for certain functional genomic and certain therapeutic applications; although Tuschl, 2001, Chem. Biochem., 2, 239-245, doubts that RNAi can be used to cure genetic diseases or viral infection due to the danger of activating interferon response. Li et al., International PCT Publication No. WO 00/44914, describe the use of specific long (141 bp-488 bp) enzymatically synthesized or vector expressed dsRNAs for attenuating the expression of certain target genes. Zernicka-Goetz et al., International PCT Publication No. WO 01/36646, describe certain methods for inhibiting the expression of particular genes in mammalian cells using certain long (550 bp-714 bp), enzymatically synthesized or vector expressed dsRNA molecules. Fire et al., International PCT Publication No. WO 99/32619, describe particular methods for introducing certain long dsRNA molecules into cells for use in inhibiting gene expression in nematodes. Plaetinck et al., International PCT Publication No. WO 00/01846, describe certain methods for identifying specific genes responsible for conferring a particular phenotype in a cell using specific long dsRNA molecules. Mello et al., International PCT Publication No. WO 01/29058, describe the identification of specific genes involved in dsRNA-mediated RNAi. Pachuck et al., International PCT Publication No. WO 00/63364, describe certain long (at least 200 nucleotide) dsRNA constructs. Deschamps Depaillette et al., International PCT Publication No. WO 99/07409, describe specific compositions consisting of particular dsRNA molecules combined with certain anti-viral agents. Waterhouse et al., International PCT Publication No. 99/53050 and 1998, PNAS, 95, 13959-13964, describe certain methods for decreasing the phenotypic expression of a nucleic acid in plant cells using certain dsRNAs. Driscoll et al., International PCT Publication No. WO 01/49844, describe specific DNA expression constructs for use in facilitating gene silencing in targeted organisms.

[0010] Others have reported on various RNAi and gene-silencing systems. For example, Parrish et al., 2000, Molecular Cell, 6, 1077-1087, describe specific chemically-modified dsRNA constructs targeting the unc-22 gene of C. elegans. Grossniklaus, International PCT Publication No. WO 01/38551, describes certain methods for regulating polycomb gene expression in plants using certain dsRNAs. Churikov et al., International PCT Publication No. WO 01/42443, describe certain methods for modifying genetic characteristics of an organism using certain dsRNAs. Cogoni et al, International PCT Publication No. WO 01/53475, describe certain methods for isolating a Neurospora silencing gene and uses thereof. Reed et al., International PCT Publication No. WO 01/68836, describe certain methods for gene silencing in plants. Honer et al., International PCT Publication No. WO 01/70944, describe certain methods of drug screening using transgenic nematodes as Parkinson's Disease models using certain dsRNAs. Deak et al., International PCT Publication No. WO 01/72774, describe certain Drosophila-derived gene products that may be related to RNAi in Drosophila. Arndt et al., International PCT Publication No. WO 01/92513 describe certain methods for mediating gene suppression by using factors that enhance RNAi. Tuschl et al., International PCT Publication No. WO 02/44321, describe certain synthetic siRNA constructs. Pachuk et al., International PCT Publication No. WO 00/63364, and Satishchandran et al., International PCT Publication No. WO 01/04313, describe certain methods and compositions for inhibiting the function of certain polynucleotide sequences using certain long (over 250 bp), vector expressed dsRNAs. Echeverri et al., International PCT Publication No. WO 02/38805, describe certain C. elegans genes identified via RNAi. Kreutzer et al., International PCT Publications Nos. WO 02/055692, WO 02/055693, and EP 1144623 B1 describes certain methods for inhibiting gene expression using dsRNA. Graham et al., International PCT Publications Nos. WO 99/49029 and WO 01/70949, and AU 4037501 describe certain vector expressed siRNA molecules. Fire et al., U.S. Pat. No. 6,506,559, describe certain methods for inhibiting gene expression in vitro using certain long dsRNA (299 bp-1033 bp) constructs that mediate RNAi. Martinez et al., 2002, Cell, 110, 563-574, describe certain single stranded siRNA constructs, including certain 5′-phosphorylated single stranded siRNAs that mediate RNA interference in Hela cells. Harborth et al., 2003, Antisense & Nucleic Acid Drug Development, 13, 83-105, describe certain chemically and structurally modified siRNA molecules. Chiu and Rana, 2003, RNA, 9, 1034-1048, describe certain chemically and structurally modified siRNA molecules. Woolf et al., International PCT Publication Nos. WO 03/064626 and WO 03/064625 describe certain chemically modified dsRNA constructs. Hornung et al., 2005, Nature Medicine, 11, 263-270, describe the sequence-specific potent induction of IFN-alpha by short interfering RNA in plasmacytoid dendritic cells through TLR7. Judge et al., 2005, Nature Biotechnology, Published online: 20 Mar. 2005, describe the sequence-dependent stimulation of the mammalian innate immune response by synthetic siRNA. Yuki et al., International PCT Publication Nos. WO 05/049821 and WO 04/048566, describe certain methods for designing short interfering RNA sequences and certain short interfering RNA sequences with optimized activity. Saigo et al., US Patent Application Publication No. US20040539332, describe certain methods of designing oligo- or polynucleotide sequences, including short interfering RNA sequences, for achieving RNA interference. Tei et al., International PCT Publication No. WO 03/044188, describe certain methods for inhibiting expression of a target gene, which comprises transfecting a cell, tissue, or individual organism with a double-stranded polynucleotide comprising DNA and RNA having a substantially identical nucleotide sequence with at least a partial nucleotide sequence of the target gene.

[0011] Mattick, 2005, Science, 309, 1527-1528; Claverie, 2005, Science, 309, 1529-1530; Sethupathy et al., 2006, RNA, 12, 192-197; and Czech, 2006 NEJM, 354, 11: 1194-1195; Hutvagner et al., US 20050227256, and Tuschl et al., US 20050182005, all describe antisense molecules that can inhibit miRNA function via steric blocking and are all incorporated by reference herein in their entirety.

[0012] McCaffrey et al., 2002, Nature, 418, 38-39, describes the use of certain siRNA constructs targeting a chimeric HCV NS5B protein/luciferase transcript in mice.

[0013] Randall et al., 2003, PNAS USA, 100, 235-240, describe certain siRNA constructs targeting HCV RNA in Huh7 hepatoma cell lines.

### SUMMARY OF THE INVENTION

[0014] This invention relates to compounds, compositions, and methods useful for modulating the expression of genes, such as those genes associated with the development or maintenance of HCV infection, liver failure, hepatocellular carcinoma, cirrhosis, and/or other disease states associated with HCV infection, by RNA interference (RNAi) using short interfering nucleic acid (siNA) molecules. This invention also relates to compounds, compositions, and methods useful for modulating the expression and activity of one or more genes involved in pathways of HCV gene expression and/or activity by RNA interference (RNAi) using small nucleic acid molecules. In particular, the instant invention features small nucleic acid molecules, such as short interfering nucleic acid (siNA), short interfering RNA (siRNA), double-stranded RNA (dsRNA), micro-RNA (miRNA), and short hairpin RNA (shRNA) molecules and methods used to modulate the expression of HCV genes and/or other genes (e.g., cellular or host genes) involved in pathways of HCV gene expression and/or infection.

[0015] The instant invention also relates to small nucleic acid molecules, such as siNA, siRNA, and others that can inhibit the function of endogenous RNA molecules, such as endogenous micro-RNA (miRNA) (e.g, miRNA inhibitors) or endogenous short interfering RNA (siRNA), (e.g., siRNA inhibitors) or that can inhibit the function of RISC (e.g., RISC inhibitors), to modulate HCV gene expression by interfering with the regulatory function of such endogenous RNAs or proteins associated with such endogenous RNAs (e.g., RISC). Such molecules are collectively referred to herein as RNAi inhibitors.

[0016] A siNA or RNAi inhibitor of the invention can be unmodified or chemically-modified. A siNA or RNAi inhibitor of the instant invention can be chemically synthesized, expressed from a vector or enzymatically synthesized. The instant invention also features various chemically-modified synthetic short interfering nucleic acid (siNA) molecules capable of modulating target gene expression or activity in cells by RNA interference (RNAi). The instant invention also features various chemically-modified synthetic short nucleic acid (siNA) molecules capable of modulating RNAi activity in cells by interacting with miRNA, siRNA, or RISC, and hence down regulating or inhibiting RNA interference (RNAi), translational inhibition, or transcriptional silencing in a cell or organism. The use of chemically-modified siNA and/or RNAi inhibitors improves various properties of native siNA molecules and/or RNAi inhibitors through increased resistance to nuclease degradation in vivo and/or through improved cellular uptake. Further, contrary to earlier published studies, siNA molecules of the invention having multiple chemical modifications, including fully modified siNA, retains its RNAi activity. Therefore, Applicant teaches herein chemically modified siRNA (generally referred to herein as siNA) that retains or improves upon the activity of native siRNA. The siNA molecules of the instant invention provide useful reagents and methods for a variety of therapeutic, prophylactic, veterinary, diagnostic, target validation, genomic discovery, genetic engineering, and pharmacogenomic applications.

[0017] In one embodiment, the invention features one or more siNA molecules and/or RNAi inhibitors and methods that independently or in combination modulate the expression of HCV and HCV related host target genes encoding proteins, such as proteins that are associated with the maintenance or development of HCV infection, liver failure, hepatocellular carcinoma, and cirrhosis, such as genes encoding sequences comprising those sequences referred to by GenBank Accession Nos. shown in Table I, referred to herein generally as HCV. The description below of the various aspects and embodiments of the invention is provided with reference to exemplary hepatitis C virus (HCV) genes, generally referred to herein as HCV. However, such reference is meant to be exemplary only and the various aspects and embodiments of the invention are also directed to other genes that express alternate HCV genes, such as mutant HCV genes, splice variants of HCV genes, and genes encoding different strains of HCV, as well as as cellular targets for HCV, such as those described herein and also referred to by GenBank Accession Nos. herein and in U.S. Provisional Patent Application No. 60/363,124, U.S. Ser. No. 10/923,536, and PCT/US03/05028 all of which are incorporated by reference herein, referred to herein generally as “target” sequences. The various aspects and embodiments are also directed to other genes involved in HCV pathways, including genes that encode cellular proteins involved in the maintenance and/or development of HCV infection, liver failure, hepatocellular carcinoma, and cirrhosis or other genes that express other proteins associated with HCV infection, such as cellular proteins that are utilized in the HCV life-cycle. Such additional genes can be analyzed for target sites using the methods described herein for HCV. Thus, the inhibition and the effects of such inhibition of the other genes can be performed as described herein. In other words, the term “HCV” as it is defined herein below and recited in the described embodiments, is meant to encompass genes associated with the development and/or maintenance of HCV infection, such as genes which encode HCV polypeptides, including polypeptides of different strains of HCV, regulatory polynucleotides (e.g., miRNAs and siRNAs), mutant HCV genes, and splice variants of HCV genes, as well as cellular genes involved in HCV pathways of gene expression, replication, and/or HCV activity. Also, the term “HCV” as it is defined herein below and recited in the described embodiments, is meant to encompass HCV viral gene products and cellular gene products involved in HCV infection, such as those described herein. Thus, each of the embodiments described herein with reference to the term “HCV” are applicable to all of the virus, cellular and viral protein, peptide, polypeptide, and/or polynucleotide molecules covered by the term “HCV”, as that term is defined herein. Comprehensively, such gene targets are also referred to herein generally as “target” sequences.

[0018] In one embodiment, the invention features a composition comprising two or more different siNA molecules and/or RNAi inhibitors of the invention (e.g., siNA, duplex forming siNA, or multifunctional siNA or any combination thereof) targeting different polynucleotide targets, such as different regions of HCV RNA (e.g., two different target sites herein), different viral strains (e.g., HCV strains, or HIV and HCV, HCV and HBV etc.), or different viral and cellular targets (e.g., a HCV target and a cellular target). Such pools of siNA molecules can prevent or overcome viral resistance or otherwise provide increased therapeutic effect.

[0019] In one embodiment, the invention features siNA molecules having RNAi specificity for the HCV minus strand, for example, Genbank Accession No. HPCK1S1, Hepatitis C virus (strain HCV-1b, clone HCV-K1-S1), complete genome; Genbank Accession No. D50483, 9410 nt.

[0020] In one embodiment, the invention features a pool of two or more different siNA molecules of the invention (e.g., siNA, duplex forming siNA, or multifunctional siNA or any combination thereof) that have specificity for different HCV polynucleotide targets, such as different regions of target HCV RNA or DNA (e.g., two different target sites herein or any combination of targets or host/pathway targets) or both coding and non-coding targets, wherein the pool comprises siNA molecules targeting about 2, 3, 4, 5, 6, 7, 8, 9, 10 or more different targets.

[0021] In one embodiment, the invention features one or more siNA molecules and methods that independently or in combination modulate the expression of genes representing cellular targets for HCV infection, such as cellular receptors, cell surface molecules, cellular enzymes, cellular transcription factors, and/or cytokines, second messengers, and cellular accessory molecules including, but not limited to, La antigen (see for example Costa-Mattioli et al., 2004, Mol Cell Biol., 24, 6861-70, e.g., Genbank Accession No. NM_{—}003142); FAS (e.g., Genbank Accession No. NM_{—}000043) or FAS ligand (e.g., Genbank Accession No. NM_{—}000639); interferon regulatory factors (IRFs; e.g., Genbank Accession No. AF082503.1); cellular PKR protein kinase (e.g., Genbank Accession No. XM_{—}002661.7); human eukaryotic initiation factors 2B (elF2Bgamma; e.g., Genbank Accession No. AF256223, and/or elF2gamma; e.g., Genbank Accession No. NM_{—}006874.1); human DEAD Box protein (DDX3; e.g., Genbank Accession No. XM_{—}018021.2); and cellular proteins that bind to the poly(U) tract of the HCV 3′-UTR, such as polypyrimidine tract-binding protein (e.g., Genbank Accession Nos. NM_{—}031991.1 and XM_{—}042972.3). Such cellular targets are also referred to herein generally as HCV targets, and specifically as “host target” or “host targets”.

[0022] Due to the high sequence variability of the HCV genome, selection of siNA molecules for broad therapeutic applications likely involve the conserved regions of the HCV genome. In one embodiment, the present invention relates to siNA molecules that target the conserved regions of the HCV genome. Examples of conserved regions of the HCV genome include, but are not limited to, the 5′-Non Coding Region (NCR, also referred to as the 5′-untranslated region, UTR), the 5′-end of the core protein coding region, and the 3′-NCR. HCV genomic RNA contains an internal ribosome entry site (IRES) in the 5′-NCR which mediates translation independently of a 5′-cap structure (Wang et al., 1993, J. Virol., 67, 3338-44). The full-length sequence of the HCV RNA genome is heterologous among clinically isolated subtypes, of which there are at least fifteen (Simmonds, 1995, Hepatology, 21, 570-583), however, the 5′-NCR sequence of HCV is highly conserved across all known subtypes, most likely to preserve the shared IRES mechanism (Okamoto et al., 1991, J. General Virol., 72, 2697-2704). Therefore, a siNA molecule can be designed to target the different isolates of HCV by targeting a conserved region, such as the 5′ NCR sequence. siNA molecules designed to target conserved regions of various HCV isolates enable efficient inhibition of HCV replication in diverse patient populations and ensure the effectiveness of the siNA molecules against HCV quasi species which evolve due to mutations in the non-conserved regions of the HCV genome. As described, a single siNA molecule can be targeted against all isolates of HCV by designing the siNA molecule to interact with conserved nucleotide sequences of HCV (e.g., sequences that are expected to be present in the RNA of various HCV isolates).

[0023] In one embodiment, the invention features a double stranded nucleic acid molecule, such as an siNA molecule, where one of the strands comprises nucleotide sequence having complementarity to a predetermined nucleotide sequence in a HCV target nucleic acid molecule, or a portion thereof. The predetermined nucleotide sequence can be a nucleotide target sequence, such as a sequence described herein or known in the art. In another embodiment, the predetermined nucleotide sequence is a HCV target sequence or pathway/host target sequence as is known in the art.

[0024] In one embodiment, the invention features a double-stranded short interfering nucleic acid (siNA) molecule that down-regulates expression of a target gene or that directs cleavage of a target RNA, wherein said siNA molecule comprises about 15 to about 28 base pairs.

[0025] In one embodiment, the invention features a double-stranded short interfering nucleic acid (siNA) molecule that directs cleavage of a target RNA, wherein said siNA molecule comprises about 15 to about 28 base pairs.

[0026] In one embodiment, the invention features a double stranded short interfering nucleic acid (siNA) molecule that directs cleavage of a target RNA via RNA interference (RNAi), wherein the double stranded siNA molecule comprises a first strand and a second strand, each strand of the siNA molecule is about 18 to about 28 (e.g., about 18, 19, 20, 21, 22, 23, 24, 25, 26, 27, or 28) nucleotides in length, the first strand of the siNA molecule comprises nucleotide sequence having sufficient complementarity to the target RNA for the siNA molecule to direct cleavage of the target RNA via RNA interference, and the second strand of said siNA molecule comprises nucleotide sequence that is complementary to the first strand. In one specific embodiment, for example, each strand of the siNA molecule is about 18 to about 27 nucleotides in length.

[0027] In one embodiment, the invention features a double stranded short interfering nucleic acid (siNA) molecule that directs cleavage of a target RNA via RNA interference (RNAi), wherein the double stranded siNA molecule comprises a first strand and a second strand, each strand of the siNA molecule is about 18 to about 23 (e.g., about 18, 19, 20, 21, 22, or 23) nucleotides in length, the first strand of the siNA molecule comprises nucleotide sequence having sufficient complementarity to the target RNA for the siNA molecule to direct cleavage of the target RNA via RNA interference, and the second strand of said siNA molecule comprises nucleotide sequence that is complementary to the first strand.

[0028] In one embodiment, the invention features a chemically synthesized double stranded short interfering nucleic acid (siNA) molecule that directs cleavage of a target RNA via RNA interference (RNAi), wherein each strand of the siNA molecule is about 18 to about 28 nucleotides in length; and one strand of the siNA molecule comprises nucleotide sequence having sufficient complementarity to the target RNA for the siNA molecule to direct cleavage of the target RNA via RNA interference.

[0029] In one embodiment, the invention features a chemically synthesized double stranded short interfering nucleic acid (siNA) molecule that directs cleavage of a target RNA via RNA interference (RNAi), wherein each strand of the siNA molecule is about 18 to about 23 nucleotides in length; and one strand of the siNA molecule comprises nucleotide sequence having sufficient complementarity to the target RNA for the siNA molecule to direct cleavage of the target RNA via RNA interference.

[0030] In one embodiment, the invention features a siNA molecule that down-regulates expression of a target gene or that directs cleavage of a target RNA, for example, wherein the target gene or RNA comprises protein encoding sequence. In one embodiment, the invention features a siNA molecule that down-regulates expression of a target gene or that directs cleavage of a target RNA, for example, wherein the target gene or RNA comprises non-coding sequence or regulatory elements involved in target gene expression (e.g., non-coding RNA, miRNA, stRNA etc.).

[0031] In one embodiment, a siNA of the invention is used to inhibit the expression of HCV target genes or a HCV target gene family (e.g., different HCV strains), wherein the genes or gene family sequences share sequence homology. Such homologous sequences can be identified as is known in the art, for example using sequence alignments. siNA molecules can be designed to target such homologous sequences, for example using perfectly complementary sequences or by incorporating non-canonical base pairs, for example mismatches and/or wobble base pairs, that can provide additional target sequences. In instances where mismatches are identified, non-canonical base pairs (for example, mismatches and/or wobble bases) can be used to generate siNA molecules that target more than one gene sequence. In a non-limiting example, non-canonical base pairs such as UU and CC base pairs are used to generate siNA molecules that are capable of targeting sequences for differing polynucleotide targets that share sequence homology. As such, one advantage of using siNAs of the invention is that a single siNA can be designed to include nucleic acid sequence that is complementary to the nucleotide sequence that is conserved between the homologous genes. In this approach, a single siNA can be used to inhibit expression of more than one gene instead of using more than one siNA molecule to target the different genes.

[0032] In one embodiment, the invention features a siNA molecule having RNAi activity against target RNA (e.g., coding or non-coding RNA), wherein the siNA molecule comprises a sequence complementary to any RNA sequence, such as those sequences having GenBank Accession Nos. herein (see for example Table I) and those shown in PCT/US03/05028, U.S. Provisional Patent Application No. 60/363,124, and/or U.S. Ser. No. 10/923,536, all of which are incorporated by reference herein. In another embodiment, the invention features a siNA molecule having RNAi activity against target RNA, wherein the siNA molecule comprises a sequence complementary to an RNA having variant encoding sequence, for example other mutant genes known in the art to be associated with the maintenance and/or development of diseases, traits, disorders, and/or conditions described herein or otherwise known in the art. Chemical modifications as shown in Table IV or otherwise described herein can be applied to any siNA construct of the invention. In another embodiment, a siNA molecule of the invention includes a nucleotide sequence that can interact with nucleotide sequence of a target gene and thereby mediate silencing of target gene expression, for example, wherein the siNA mediates regulation of target gene expression by cellular processes that modulate the chromatin structure or methylation patterns of the target gene and prevent transcription of the target gene.

[0033] In one embodiment, siNA molecules of the invention are used to down regulate or inhibit the expression of proteins arising from haplotype polymorphisms that are associated with a trait, disease or condition in a subject or organism. Analysis of genes, or protein or RNA levels can be used to identify subjects with such polymorphisms or those subjects who are at risk of developing traits, conditions, or diseases described herein. These subjects are amenable to treatment, for example, treatment with siNA molecules of the invention and any other composition useful in treating diseases related to target gene expression. As such, analysis of protein or RNA levels can be used to determine treatment type and the course of therapy in treating a subject. Monitoring of protein or RNA levels can be used to predict treatment outcome and to determine the efficacy of compounds and compositions that modulate the level and/or activity of certain proteins associated with a trait, disorder, condition, or disease.

[0034] In one embodiment of the invention a siNA molecule comprises an antisense strand comprising a nucleotide sequence that is complementary to a nucleotide sequence or a portion thereof encoding a target protein. The siNA further comprises a sense strand, wherein said sense strand comprises a nucleotide sequence of a target gene or a portion thereof.

[0035] In another embodiment, a siNA molecule comprises an antisense region comprising a nucleotide sequence that is complementary to a nucleotide sequence encoding a target protein or a portion thereof. The siNA molecule further comprises a sense region, wherein said sense region comprises a nucleotide sequence of a target gene or a portion thereof.

[0036] In another embodiment, the invention features a siNA molecule comprising nucleotide sequence, for example, nucleotide sequence in the antisense region of the siNA molecule that is complementary to a nucleotide sequence or portion of sequence of a target gene. In another embodiment, the invention features a siNA molecule comprising a region, for example, the antisense region of the siNA construct, complementary to a sequence comprising a target gene sequence or a portion thereof.

[0037] In one embodiment, the sense region or sense strand of a siNA molecule of the invention is complementary to that portion of the antisense region or antisense strand of the siNA molecule that is complementary to a target polynucleotide sequence.

[0038] In yet another embodiment, the invention features a siNA molecule comprising a sequence, for example, the antisense sequence of the siNA construct, complementary to a sequence or portion of sequence comprising sequence represented by GenBank Accession Nos. shown in Table I and in PCT/US03/05028, U.S. Provisional Patent Application No. 60/363,124, and/or U.S. Ser. No. 10/923,536, all of which are incorporated by reference herein. Chemical modifications in Tables III and IV and otherwise described herein can be applied to any siNA construct of the invention. LNP formulations described in Table VI can be applied to any siNA molecule or combination of siNA molecules herein.

[0039] In one embodiment of the invention a siNA molecule comprises an antisense strand having about 15 to about 30 (e.g., about 15, 16, 17, 18, 19, 20, 21, 22, 23, 24, 25, 26, 27, 28, 29, or 30) nucleotides, wherein the antisense strand is complementary to a target RNA sequence or a portion thereof, and wherein said siNA further comprises a sense strand having about 15 to about 30 (e.g., about 15, 16, 17, 18, 19, 20, 21, 22, 23, 24, 25, 26, 27, 28, 29, or 30) nucleotides, and wherein said sense strand and said antisense strand are distinct nucleotide sequences where at least about 15 nucleotides in each strand are complementary to the other strand.

[0040] In one embodiment, a siNA molecule of the invention (e.g., a double stranded nucleic acid molecule) comprises an antisense (guide) strand having about 15 to about 30 (e.g., about 15, 16, 17, 18, 19, 20, 21, 22, 23, 24, 25, 26, 27, 28, 29, or 30) nucleotides that are complementary to a target RNA sequence or a portion thereof. In one embodiment, at least 15 nucleotides (e.g., 15, 16, 17, 18, 19, 20, 21, 22, 23, 24, 25, 26, 27, 28, 29, or 30 nucleotides) of a target RNA sequence are complementary to the antisense (guide) strand of a siNA molecule of the invention.

[0041] In one embodiment, a siNA molecule of the invention (e.g., a double stranded nucleic acid molecule) comprises a sense (passenger) strand having about 15 to about 30 (e.g., about 15, 16, 17, 18, 19, 20, 21, 22, 23, 24, 25, 26, 27, 28, 29, or 30) nucleotides that comprise sequence of a target RNA or a portion thereof. In one embodiment, at least 15 nucleotides (e.g., about 15, 16, 17, 18, 19, 20, 21, 22, 23, 24, 25, 26, 27, 28, 29, or 30) nucleotides of a target RNA sequence comprise the sense (passenger) strand of a siNA molecule of the invention.

[0042] In another embodiment of the invention a siNA molecule of the invention comprises an antisense region having about 15 to about 30 (e.g., about 15, 16, 17, 18, 19, 20, 21, 22, 23, 24, 25, 26, 27, 28, 29, or 30) nucleotides, wherein the antisense region is complementary to a target DNA sequence, and wherein said siNA further comprises a sense region having about 15 to about 30 (e.g., about 15, 16, 17, 18, 19, 20, 21, 22, 23, 24, 25, 26, 27, 28, 29, or 30) nucleotides, wherein said sense region and said antisense region are comprised in a linear molecule where the sense region comprises at least about 15 nucleotides that are complementary to the antisense region.

[0043] In one embodiment, a siNA molecule of the invention has RNAi activity that modulates expression of RNA encoded by a HCV gene. Because HCV genes can share some degree of sequence homology with each other, siNA molecules can be designed to target a class of HCV genes (e.g., a class of different HCV strains) or alternately specific HCV genes (e.g., escape mutants, resistant strains, or other polymorphic variants) by selecting sequences that are either shared amongst different HCV targets or alternatively that are unique for a specific HCV target. Therefore, in one embodiment, the siNA molecule can be designed to target conserved regions of HCV RNA sequences having homology among several HCV gene variants so as to target a class of HCV genes with one siNA molecule. Accordingly, in one embodiment, the siNA molecule of the invention modulates the expression of one or more HCV stains in a subject or organism. In another embodiment, the siNA molecule can be designed to target a sequence that is unique to a specific HCV RNA sequence (e.g., a single HCV strain or HCV single nucleotide polymorphism (SNP)) due to the high degree of specificity that the siNA molecule requires to mediate RNAi activity.

[0044] In one embodiment, nucleic acid molecules of the invention that act as mediators of the RNA interference gene silencing response are double-stranded nucleic acid molecules. In another embodiment, the siNA molecules of the invention consist of duplex nucleic acid molecules containing about 15 to about 30 base pairs between oligonucleotides comprising about 15 to about 30 (e.g., about 15, 16, 17, 18, 19, 20, 21, 22, 23, 24, 25, 26, 27, 28, 29, or 30) nucleotides. In yet another embodiment, siNA molecules of the invention comprise duplex nucleic acid molecules with overhanging ends of about 1 to about 3 (e.g., about 1, 2, or 3) nucleotides, for example, about 21-nucleotide duplexes with about 19 base pairs and 3′-terminal mononucleotide, dinucleotide, or trinucleotide overhangs. In yet another embodiment, siNA molecules of the invention comprise duplex nucleic acid molecules with blunt ends, where both ends are blunt, or alternatively, where one of the ends is blunt.

[0045] In one embodiment, a double stranded nucleic acid (e.g., siNA) molecule comprises nucleotide or non-nucleotide overhangs. By “overhang” is meant a terminal portion of the nucleotide sequence that is not base paired between the two strands of a double stranded nucleic acid molecule (see for example FIG. 6). In one embodiment, a double stranded nucleic acid molecule of the invention can comprise nucleotide or non-nucleotide overhangs at the 3′-end of one or both strands of the double stranded nucleic acid molecule. For example, a double stranded nucleic acid molecule of the invention can comprise a nucleotide or non-nucleotide overhang at the 3′-end of the guide strand or antisense strand/region, the 3′-end of the passenger strand or sense strand/region, or both the guide strand or antisense strand/region and the passenger strand or sense strand/region of the double stranded nucleic acid molecule. In another embodiment, the nucleotide overhang portion of a double stranded nucleic acid (siNA) molecule of the invention comprises 2′-O-methyl, 2′-deoxy, 2′-deoxy-2′-fluoro, 2′-deoxy-2′-fluoroarabino (FANA), 4′-thio, 2′-O-trifluoromethyl, 2′-O-ethyl-trifluoromethoxy, 2′-O-difluoromethoxy-ethoxy, universal base, acyclic, or 5-C-methyl nucleotides. In another embodiment, the non-nucleotide overhang portion of a double stranded nucleic acid (siNA) molecule of the invention comprises glyceryl, abasic, or inverted deoxy abasic non-nucleotides.

[0046] In one embodiment, the nucleotides comprising the overhang portions of a double stranded nucleic acid (e.g., siNA) molecule of the invention correspond to the nucleotides comprising the target polynucleotide sequence of the siNA molecule. Accordingly, in such embodiments, the nucleotides comprising the overhang portion of a siNA molecule of the invention comprise sequence based on the target polynucleotide sequence in which nucleotides comprising the overhang portion of the guide strand or antisense strand/region of a siNA molecule of the invention can be complementary to nucleotides in the target polynucleotide sequence and nucleotides comprising the overhang portion of the passenger strand or sense strand/region of a siNA molecule of the invention can comprise the nucleotides in the target polynucleotide sequence. Such nucleotide overhangs comprise sequence that would result from Dicer processing of a native dsRNA into siRNA.

[0047] In one embodiment, the nucleotides comprising the overhang portion of a double stranded nucleic acid (e.g., siNA) molecule of the invention are complementary to the target polynucleotide sequence and are optionally chemically modified as described herein. As such, in one embodiment, the nucleotides comprising the overhang portion of the guide strand or antisense strand/region of a siNA molecule of the invention can be complementary to nucleotides in the target polynucleotide sequence, i.e. those nucleotide positions in the target polynucleotide sequence that are complementary to the nucleotide positions of the overhang nucleotides in the guide strand or antisense strand/region of a siNA molecule. In another embodiment, the nucleotides comprising the overhang portion of the passenger strand or sense strand/region of a siNA molecule of the invention can comprise the nucleotides in the target polynucleotide sequence, i.e. those nucleotide positions in the target polynucleotide sequence that correspond to same the nucleotide positions of the overhang nucleotides in the passenger strand or sense strand/region of a siNA molecule. In one embodiment, the overhang comprises a two nucleotide (e.g., 3′-GA; 3′-GU; 3′-GG; 3′GC; 3′-CA; 3′-CU; 3′-CG; 3′CC; 3′-UA; 3′-UU; 3′-UG; 3′UC; 3′-AA; 3′-AU; 3′-AG; 3′-AC; 3′-TA; 3′-TU; 3′-TG; 3′-TC; 3′-AT; 3′-UT; 3′-GT; 3′-CT) overhang that is complementary to a portion of the target polynucleotide sequence. In one embodiment, the overhang comprises a two nucleotide (e.g., 3′-GA; 3′-GU; 3′-GG; 3′GC; 3′-CA; 3′-CU; 3′-CG; 3′CC; 3′-UA; 3′-UU; 3′-UG; 3′UC; 3′-AA; 3′-AU; 3′-AG; 3′-AC; 3′-TA; 3′-TU; 3′-TG; 3′-TC; 3′-AT; 3′-UT; 3′-GT; 3′-CT) overhang that is not complementary to a portion of the target polynucleotide sequence.

[0048] In another embodiment, the overhang nucleotides of a siNA molecule of the invention are 2′-O-methyl nucleotides, 2′-deoxy-2′-fluoroarabino, and/or 2′-deoxy-2′-fluoro nucleotides. In another embodiment, the overhang nucleotides of a siNA molecule of the invention are 2′-O-methyl nucleotides in the event the overhang nucleotides are purine nucleotides and/or 2′-deoxy-2′-fluoro nucleotides or 2′-deoxy-2′-fluoroarabino nucleotides in the event the overhang nucleotides are pyrimidines nucleotides. In another embodiment, the purine nucleotide (when present) in an overhang of siNA molecule of the invention is 2′-O-methyl nucleotides. In another embodiment, the pyrimidine nucleotide (when present) in an overhang of siNA molecule of the invention are 2′-deoxy-2′-fluoro or 2′-deoxy-2′-fluoroarabino nucleotides.

[0049] In one embodiment, the nucleotides comprising the overhang portion of a double stranded nucleic acid (e.g., siNA) molecule of the invention are not complementary to the target polynucleotide sequence and are optionally chemically modified as described herein. In one embodiment, the overhang comprises a 3′-UU overhang that is not complementary to a portion of the target polynucleotide sequence. In another embodiment, the nucleotides comprising the overhanging portion of a siNA molecule of the invention are 2′-O-methyl nucleotides, 2′-deoxy-2′-fluoroarabino and/or 2′-deoxy-2′-fluoro nucleotides.

[0050] In one embodiment, the double stranded nucleic molecule (e.g. siNA) of the invention comprises a two or three nucleotide overhang, wherein the nucleotides in the overhang are the same or different. In one embodiment, the double stranded nucleic molecule (e.g. siNA) of the invention comprises a two or three nucleotide overhang, wherein the nucleotides in the overhang are the same or different and wherein one or more nucleotides in the overhang are chemically modified at the base, sugar and/or phosphate backbone.

[0051] In one embodiment, the invention features one or more chemically-modified siNA constructs having specificity for target nucleic acid molecules, such as DNA, or RNA encoding a protein or non-coding RNA associated with the expression of target genes. In one embodiment, the invention features a RNA based siNA molecule (e.g., a siNA comprising 2′-OH nucleotides) having specificity for nucleic acid molecules that includes one or more chemical modifications described herein. Non-limiting examples of such chemical modifications include without limitation phosphorothioate internucleotide linkages, 2′-deoxyribonucleotides, 2′-O-methyl ribonucleotides, 2′-deoxy-2′-fluoro ribonucleotides, 4′-thio ribonucleotides, 2′-O-trifluoromethyl nucleotides, 2′-O-ethyl-trifluoromethoxy nucleotides, 2′-O-difluoromethoxy-ethoxy nucleotides (see for example U.S. Ser. No. 10/981,966 filed Nov. 5, 2004, incorporated by reference herein), “universal base” nucleotides, “acyclic” nucleotides, 5-C-methyl nucleotides, 2′-deoxy-2′-fluoroarabino (FANA, see for example Dowler et al., 2006, Nucleic Acids Research, 34, 1669-1675) and terminal glyceryl and/or inverted deoxy abasic residue incorporation. These chemical modifications, when used in various siNA constructs, (e.g., RNA based siNA constructs), are shown to preserve RNAi activity in cells while at the same time, dramatically increasing the serum stability of these compounds.

[0052] In one embodiment, a siNA molecule of the invention comprises chemical modifications described herein (e.g., 2′-O-methyl ribonucleotides, 2′-deoxy-2′-fluoro ribonucleotides, 4′-thio ribonucleotides, 2′-O-trifluoromethyl nucleotides, 2′-O-ethyl-trifluoromethoxy nucleotides, 2′-O-difluoromethoxy-ethoxy nucleotides, LNA) at the internal positions of the siNA molecule. By “internal position” is meant the base paired positions of a siNA duplex.

[0053] In one embodiment, a siNA molecule of the invention comprises modified nucleotides while maintaining the ability to mediate RNAi. The modified nucleotides can be used to improve in vitro or in vivo characteristics such as stability, activity, toxicity, immune response, and/or bioavailability. For example, a siNA molecule of the invention can comprise modified nucleotides as a percentage of the total number of nucleotides present in the siNA molecule. As such, a siNA molecule of the invention can generally comprise about 5% to about 100% modified nucleotides (e.g., about 5%, 10%, 15%, 20%, 25%, 30%, 35%, 40%, 45%, 50%, 55%, 60%, 65%, 70%, 75%, 80%, 85%, 90%, 95% or 100% modified nucleotides). For example, in one embodiment, between about 5% to about 100% (e.g., about 5%, 10%, 15%, 20%, 25%, 30%, 35%, 40%, 45%, 50%, 55%, 60%, 65%, 70%, 75%, 80%, 85%, 90%, 95% or 100% modified nucleotides) of the nucleotide positions in a siNA molecule of the invention comprise a nucleic acid sugar modification, such as a 2′-sugar modification, e.g., 2′-O-methyl nucleotides, 2′-deoxy-2′-fluoro nucleotides, 2′-deoxy-2′-fluoroarabino, 2′-O-methoxyethyl nucleotides, 2′-O-trifluoromethyl nucleotides, 2′-O-ethyl-trifluoromethoxy nucleotides, 2′-O-difluoromethoxy-ethoxy nucleotides, or 2′-deoxy nucleotides. In another embodiment, between about 5% to about 100% (e.g., about 5%, 10%, 15%, 20%, 25%, 30%, 35%, 40%, 45%, 50%, 55%, 60%, 65%, 70%, 75%, 80%, 85%, 90%, 95% or 100% modified nucleotides) of the nucleotide positions in a siNA molecule of the invention comprise a nucleic acid base modification, such as inosine, purine, pyridin-4-one, pyridin-2-one, phenyl, pseudouracil, 2,4,6-trimethoxy benzene, 3-methyl uracil, dihydrouridine, naphthyl, aminophenyl, 5-alkylcytidines (e.g., 5-methylcytidine), 5-alkyluridines (e.g., ribothymidine), 5-halouridine (e.g., 5-bromouridine) or 6-azapyrimidines or 6-alkylpyrimidines (e.g. 6-methyluridine), or propyne modifications. In another embodiment, between about 5% to about 100% (e.g., about 5%, 10%, 15%, 20%, 25%, 30%, 35%, 40%, 45%, 50%, 55%, 60%, 65%, 70%, 75%, 80%, 85%, 90%, 95% or 100% modified nucleotides) of the nucleotide positions in a siNA molecule of the invention comprise a nucleic acid backbone modification, such as a backbone modification having Formula I herein. In another embodiment, between about 5% to about 100% (e.g., about 5%, 10%, 15%, 20%, 25%, 30%, 35%, 40%, 45%, 50%, 55%, 60%, 65%, 70%, 75%, 80%, 85%, 90%, 95% or 100% modified nucleotides) of the nucleotide positions in a siNA molecule of the invention comprise a nucleic acid sugar, base, or backbone modification or any combination thereof (e.g., any combination of nucleic acid sugar, base, backbone or non-nucleotide modifications herein). In one embodiment, a siNA molecule of the invention comprises at least about 20%, 25%, 30%, 35%, 40%, 45%, 50%, 55%, 60%, 65%, 70%, 75%, 80%, 85%, 90%, 95% or 100% modified nucleotides. The actual percentage of modified nucleotides present in a given siNA molecule will depend on the total number of nucleotides present in the siNA. If the siNA molecule is single stranded, the percent modification can be based upon the total number of nucleotides present in the single stranded siNA molecules. Likewise, if the siNA molecule is double stranded, the percent modification can be based upon the total number of nucleotides present in the sense strand, antisense strand, or both the sense and antisense strands.

[0054] A siNA molecule of the invention can comprise modified nucleotides at various locations within the siNA molecule. In one embodiment, a double stranded siNA molecule of the invention comprises modified nucleotides at internal base paired positions within the siNA duplex. For example, internal positions can comprise positions from about 3 to about 19 nucleotides from the 5′-end of either sense or antisense strand or region of a 21 nucleotide siNA duplex having 19 base pairs and two nucleotide 3′-overhangs. In another embodiment, a double stranded siNA molecule of the invention comprises modified nucleotides at non-base paired or overhang regions of the siNA molecule. By “non-base paired” is meant, the nucleotides are not base paired between the sense strand or sense region and the antisense strand or antisense region or the siNA molecule. The overhang nucleotides can be complementary or base paired to a corresponding target polynucleotide sequence (see for example FIG. 6C). For example, overhang positions can comprise positions from about 20 to about 21 nucleotides from the 5′-end of either sense or antisense strand or region of a 21 nucleotide siNA duplex having 19 base pairs and two nucleotide 3′-overhangs. In another embodiment, a double stranded siNA molecule of the invention comprises modified nucleotides at terminal positions of the siNA molecule. For example, such terminal regions include the 3′-position, 5′-position, for both 3′ and 5′-positions of the sense and/or antisense strand or region of the siNA molecule. In another embodiment, a double stranded siNA molecule of the invention comprises modified nucleotides at base-paired or internal positions, non-base paired or overhang regions, and/or terminal regions, or any combination thereof.

[0055] One aspect of the invention features a double-stranded short interfering nucleic acid (siNA) molecule that down-regulates expression of a target gene or that directs cleavage of a target RNA. In one embodiment, the double stranded siNA molecule comprises one or more chemical modifications and each strand of the double-stranded siNA is about 21 nucleotides long. In one embodiment, the double-stranded siNA molecule does not contain any ribonucleotides. In another embodiment, the double-stranded siNA molecule comprises one or more ribonucleotides. In one embodiment, each strand of the double-stranded siNA molecule independently comprises about 15 to about 30 (e.g., about 15, 16, 17, 18, 19, 20, 21, 22, 23, 24, 25, 26, 27, 28, 29, or 30) nucleotides, wherein each strand comprises about 15 to about 30 (e.g., about 15, 16, 17, 18, 19, 20, 21, 22, 23, 24, 25, 26, 27, 28, 29, or 30) nucleotides that are complementary to the nucleotides of the other strand. In one embodiment, one of the strands of the double-stranded siNA molecule comprises a nucleotide sequence that is complementary to a nucleotide sequence or a portion thereof of the target gene, and the second strand of the double-stranded siNA molecule comprises a nucleotide sequence substantially similar to the nucleotide sequence of the target gene or a portion thereof.

[0056] In another embodiment, the invention features a double-stranded short interfering nucleic acid (siNA) molecule that down-regulates expression of a target gene or that directs cleavage of a target RNA, comprising an antisense region, wherein the antisense region comprises a nucleotide sequence that is complementary to a nucleotide sequence of the target gene or a portion thereof, and a sense region, wherein the sense region comprises a nucleotide sequence substantially similar to the nucleotide sequence of the target gene or a portion thereof. In one embodiment, the antisense region and the sense region independently comprise about 15 to about 30 (e.g. about 15, 16, 17, 18, 19, 20, 21, 22, 23, 24, 25, 26, 27, 28, 29, or 30) nucleotides, wherein the antisense region comprises about 15 to about 30 (e.g. about 15, 16, 17, 18, 19, 20, 21, 22, 23, 24, 25, 26, 27, 28, 29, or 30) nucleotides that are complementary to nucleotides of the sense region.

[0057] In another embodiment, the invention features a double-stranded short interfering nucleic acid (siNA) molecule that down-regulates expression of a target gene or that directs cleavage of a target RNA, comprising a sense region and an antisense region, wherein the antisense region comprises a nucleotide sequence that is complementary to a nucleotide sequence of RNA encoded by the target gene or a portion thereof and the sense region comprises a nucleotide sequence that is complementary to the antisense region.

[0058] In one embodiment, a siNA molecule of the invention comprises blunt ends, i.e., ends that do not include any overhanging nucleotides. For example, a siNA molecule comprising modifications described herein (e.g., comprising nucleotides having Formulae I-VII or siNA constructs comprising “Stab 00”-“Stab 36” or “Stab 3F”-“Stab 36F” (Table IV) or any combination thereof) and/or any length described herein can comprise blunt ends or ends with no overhanging nucleotides.

[0059] In one embodiment, any siNA molecule of the invention can comprise one or more blunt ends, i.e. where a blunt end does not have any overhanging nucleotides. In one embodiment, the blunt ended siNA molecule has a number of base pairs equal to the number of nucleotides present in each strand of the siNA molecule. In another embodiment, the siNA molecule comprises one blunt end, for example wherein the 5′-end of the antisense strand and the 3′-end of the sense strand do not have any overhanging nucleotides. In another example, the siNA molecule comprises one blunt end, for example, wherein the 3′-end of the antisense strand and the 5′-end of the sense strand do not have any overhanging nucleotides. In another example, a siNA molecule comprises two blunt ends, for example, wherein the 3′-end of the antisense strand and the 5′-end of the sense strand as well as the 5′-end of the antisense strand and 3′-end of the sense strand do not have any overhanging nucleotides. A blunt ended siNA molecule can comprise, for example, from about 15 to about 30 nucleotides (e.g., about 15, 16, 17, 18, 19, 20, 21, 22, 23, 24, 25, 26, 27, 28, 29, or 30 nucleotides). Other nucleotides present in a blunt ended siNA molecule can comprise, for example, mismatches, bulges, loops, or wobble base pairs to modulate the activity of the siNA molecule to mediate RNA interference.

[0060] By “blunt ends” is meant symmetric termini or termini of a double stranded siNA molecule having no overhanging nucleotides. The two strands of a double stranded siNA molecule align with each other without over-hanging nucleotides at the termini. For example, a blunt ended siNA construct comprises terminal nucleotides that are complementary between the sense and antisense regions of the siNA molecule.

[0061] In one embodiment, the invention features a double-stranded short interfering nucleic acid (siNA) molecule that down-regulates expression of a target gene or that directs cleavage of a target RNA, wherein the siNA molecule is assembled from two separate oligonucleotide fragments wherein one fragment comprises the sense region and the second fragment comprises the antisense region of the siNA molecule. The sense region can be connected to the antisense region via a linker molecule, such as a polynucleotide linker or a non-nucleotide linker.

[0062] In one embodiment, a double stranded nucleic acid molecule (e.g., siNA) molecule of the invention comprises ribonucleotides at positions that maintain or enhance RNAi activity. In one embodiment, ribonucleotides are present in the sense strand or sense region of the siNA molecule, which can provide for RNAi activity by allowing cleavage of the sense strand or sense region by an enzyme within the RISC (e.g., ribonucleotides present at the position of passenger strand, sense strand, or sense region cleavage, such as position 9 of the passenger strand of a 19 base-pair duplex, which is cleaved in the RISC by AGO2 enzyme, see, for example, Matranga et al., 2005, Cell, 123:1-114 and Rand et al., 2005, Cell, 123:621-629). In another embodiment, one or more (for example 1, 2, 3, 4 or 5) nucleotides at the 5′-end of the guide strand or guide region (also known as antisense strand or antisense region) of the siNA molecule are ribonucleotides.

[0063] In one embodiment, a double stranded nucleic acid molecule (e.g., siNA) molecule of the invention comprises one or more ribonucleotides at positions within the passenger strand or passenger region (also known as the sense strand or sense region) that allows cleavage of the passenger strand or passenger region by an enzyme in the RISC complex, (e.g., ribonucleotides present at the position of passenger strand, such as position 9 of the passenger strand of a 19 base-pair duplex that is cleaved in the RISC, see, for example, Matranga et al., 2005, Cell, 123:1-114 and Rand et al., 2005, Cell, 123:621-629).

[0064] In one embodiment, a siNA molecule of the invention contains at least 2, 3, 4, 5, or more chemical modifications that can be the same of different. In one embodiment, a siNA molecule of the invention contains at least 2, 3, 4, 5, or more different chemical modifications.

[0065] In one embodiment, a siNA molecule of the invention is a double-stranded short interfering nucleic acid (siNA), wherein the double stranded nucleic acid molecule comprises about 15 to about 30 (e.g. about 15, 16, 17, 18, 19, 20, 21, 22, 23, 24, 25, 26, 27, 28, 29, or 30) base pairs, and wherein one or more (e.g., at least 1, 2, 3, 4, 5, 6, 7, 8, 9, 10, 11, 12, 13, 14, 15, 16, 17, 18, 19, 20, 21, 22, 23, 24, 25, 26, 27, 28, 29, or 30) of the nucleotide positions in each strand of the siNA molecule comprises a chemical modification. In another embodiment, the siNA contains at least 2, 3, 4, 5, or more different chemical modifications.

[0066] In one embodiment, the invention features double-stranded short interfering nucleic acid (siNA) molecule that down-regulates expression of a target gene or that directs cleavage of a target RNA, wherein the siNA molecule comprises about 15 to about 30 (e.g. about 15, 16, 17, 18, 19, 20, 21, 22, 23, 24, 25, 26, 27, 28, 29, or 30) base pairs, and wherein each strand of the siNA molecule comprises one or more chemical modifications. In one embodiment, each strand of the double stranded siNA molecule comprises at least two (e.g., 2, 3, 4, 5, or more) different chemical modifications, e.g., different nucleotide sugar, base, or backbone modifications. In another embodiment, one of the strands of the double-stranded siNA molecule comprises a nucleotide sequence that is complementary to a nucleotide sequence of a target gene or a portion thereof, and the second strand of the double-stranded siNA molecule comprises a nucleotide sequence substantially similar to the nucleotide sequence or a portion thereof of the target gene. In another embodiment, one of the strands of the double-stranded siNA molecule comprises a nucleotide sequence that is complementary to a nucleotide sequence of a target gene or portion thereof, and the second strand of the double-stranded siNA molecule comprises a nucleotide sequence substantially similar to the nucleotide sequence or portion thereof of the target gene. In another embodiment, each strand of the siNA molecule comprises about 15 to about 30 (e.g. about 15, 16, 17, 18, 19, 20, 21, 22, 23, 24, 25, 26, 27, 28, 29, or 30) nucleotides, and each strand comprises at least about 15 to about 30 (e.g. about 15, 16, 17, 18, 19, 20, 21, 22, 23, 24, 25, 26, 27, 28, 29, or 30) nucleotides that are complementary to the nucleotides of the other strand. The target gene can comprise, for example, sequences referred to herein or incorporated herein by reference. The gene can comprise, for example, sequences referred to by GenBank Accession number herein.

[0067] In one embodiment, each strand of a double stranded siNA molecule of the invention comprises a different pattern of chemical modifications, such as any “Stab 00”-“Stab 36” or “Stab 3F”-“Stab 36F” (Table IV) modification patterns herein or any combination thereof. Non-limiting examples of sense and antisense strands of such siNA molecules having various modification patterns are shown in Table III and FIGS. 4 and 5.

[0068] In one embodiment, a siNA molecule of the invention comprises no ribonucleotides. In another embodiment, a siNA molecule of the invention comprises one or more ribonucleotides (e.g., 1, 2, 3, 4, 5, 6, 7, 8, 9, 10, or more ribonucleotides).

[0069] In one embodiment, a siNA molecule of the invention comprises an antisense region comprising a nucleotide sequence that is complementary to a nucleotide sequence of a target gene or a portion thereof, and the siNA further comprises a sense region comprising a nucleotide sequence substantially similar to the nucleotide sequence of the target gene or a portion thereof. In another embodiment, the antisense region and the sense region each comprise about 15 to about 30 (e.g. about 15, 16, 17, 18, 19, 20, 21, 22, 23, 24, 25, 26, 27, 28, 29, or 30) nucleotides and the antisense region comprises at least about 15 to about 30 (e.g. about 15, 16, 17, 18, 19, 20, 21, 22, 23, 24, 25, 26, 27, 28, 29, or 30) nucleotides that are complementary to nucleotides of the sense region. In one embodiment, each strand of the double stranded siNA molecule comprises at least two (e.g., 2, 3, 4, 5, or more) different chemical modifications, e.g., different nucleotide sugar, base, or backbone modifications. The target gene can comprise, for example, sequences referred to herein or incorporated by reference herein. In another embodiment, the siNA is a double stranded nucleic acid molecule, where each of the two strands of the siNA molecule independently comprise about 15 to about 40 (e.g. about 15, 16, 17, 18, 19, 20, 21, 22, 23, 24, 25, 26, 27, 28, 29, 30, 31, 23, 33, 34, 35, 36, 37, 38, 39, or 40) nucleotides, and where one of the strands of the siNA molecule comprises at least about 15 (e.g. about 15, 16, 17, 18, 19, 20, 21, 22, 23, 24 or 25 or more) nucleotides that are complementary to the nucleic acid sequence of the target gene or a portion thereof.

[0070] In one embodiment, a siNA molecule of the invention comprises a sense region and an antisense region, wherein the antisense region comprises a nucleotide sequence that is complementary to a nucleotide sequence of RNA encoded by a target gene, or a portion thereof, and the sense region comprises a nucleotide sequence that is complementary to the antisense region. In one embodiment, the siNA molecule is assembled from two separate oligonucleotide fragments, wherein one fragment comprises the sense region and the second fragment comprises the antisense region of the siNA molecule. In another embodiment, the sense region is connected to the antisense region via a linker molecule. In another embodiment, the sense region is connected to the antisense region via a linker molecule, such as a nucleotide or non-nucleotide linker. In one embodiment, each strand of the double stranded siNA molecule comprises at least two (e.g., 2, 3, 4, 5, or more) different chemical modifications, e.g., different nucleotide sugar, base, or backbone modifications. The target gene can comprise, for example, sequences referred herein or incorporated by reference herein.

[0071] In one embodiment, a siNA molecule of the invention comprises one or more (e.g., 1, 2, 3, 4, 5, 6, 7, 8, 9, 10, 11, 12, 13, 14, 15, 16, 17, 18, 19, 20 or more) 2′-deoxy-2′-fluoro pyrimidine modifications (e.g., where one or more or all pyrimidine (e.g., U or C) positions of the siNA are modified with 2′-deoxy-2′-fluoro nucleotides). In one embodiment, the 2′-deoxy-2′-fluoro pyrimidine modifications are present in the sense strand. In one embodiment, the 2′-deoxy-2′-fluoro pyrimidine modifications are present in the antisense strand. In one embodiment, the 2′-deoxy-2′-fluoro pyrimidine modifications are present in both the sense strand and the antisense strand of the siNA molecule.

[0072] In one embodiment, a siNA molecule of the invention comprises one or more (e.g., 1, 2, 3, 4, 5, 6, 7, 8, 9, 10, 11, 12, 13, 14, 15, 16, 17, 18, 19, 20 or more) 2′-O-methyl purine modifications (e.g., where one or more or all purine (e.g., A or G) positions of the siNA are modified with 2′-O-methyl nucleotides). In one embodiment, the 2′-O-methyl purine modifications are present in the sense strand. In one embodiment, the 2′-O-methyl purine modifications are present in the antisense strand. In one embodiment, the 2′-O-methyl purine modifications are present in both the sense strand and the antisense strand of the siNA molecule.

[0073] In one embodiment, a siNA molecule of the invention comprises one or more (e.g., 1, 2, 3, 4, 5, 6, 7, 8, 9, 10, 11, 12, 13, 14, 15, 16, 17, 18, 19, 20 or more) 2′-deoxy purine modifications (e.g., where one or more or all purine (e.g., A or G) positions of the siNA are modified with 2′-deoxy nucleotides). In one embodiment, the 2′-deoxy purine modifications are present in the sense strand. In one embodiment, the 2′-deoxy purine modifications are present in the antisense strand. In one embodiment, the 2′-deoxy purine modifications are present in both the sense strand and the antisense strand of the siNA molecule.

[0074] In one embodiment, the invention features a double-stranded short interfering nucleic acid (siNA) molecule that down-regulates expression of a target gene or that directs cleavage of a target RNA, comprising a sense region and an antisense region, wherein the antisense region comprises a nucleotide sequence that is complementary to a nucleotide sequence of RNA encoded by the target gene or a portion thereof and the sense region comprises a nucleotide sequence that is complementary to the antisense region, and wherein the siNA molecule has one or more modified pyrimidine and/or purine nucleotides. In one embodiment, each strand of the double stranded siNA molecule comprises at least two (e.g., 2, 3, 4, 5, or more) different chemical modifications, e.g., different nucleotide sugar, base, or backbone modifications. In one embodiment, the pyrimidine nucleotides in the sense region are 2′-O-methylpyrimidine nucleotides or 2′-deoxy-2′-fluoro pyrimidine nucleotides and the purine nucleotides present in the sense region are 2′-deoxy purine nucleotides. In another embodiment, the pyrimidine nucleotides in the sense region are 2′-deoxy-2′-fluoro pyrimidine nucleotides and the purine nucleotides present in the sense region are 2′-O-methyl purine nucleotides. In another embodiment, the pyrimidine nucleotides in the sense region are 2′-deoxy-2′-fluoro pyrimidine nucleotides and the purine nucleotides present in the sense region are 2′-deoxy purine nucleotides. In one embodiment, the pyrimidine nucleotides in the antisense region are 2′-deoxy-2′-fluoro pyrimidine nucleotides and the purine nucleotides present in the antisense region are 2′-O-methyl or 2′-deoxy purine nucleotides. In another embodiment of any of the above-described siNA molecules, any nucleotides present in a non-complementary region of the sense strand (e.g. overhang region) are 2′-deoxy nucleotides.

[0075] In one embodiment, the invention features a double-stranded short interfering nucleic acid (siNA) molecule that down-regulates expression of a target gene or that directs cleavage of a target RNA, wherein the siNA molecule is assembled from two separate oligonucleotide fragments wherein one fragment comprises the sense region and the second fragment comprises the antisense region of the siNA molecule, and wherein the fragment comprising the sense region includes a terminal cap moiety at the 5′-end, the 3′-end, or both of the 5′ and 3′ ends of the fragment. In one embodiment, the terminal cap moiety is an inverted deoxy abasic moiety or glyceryl moiety. In one embodiment, each of the two fragments of the siNA molecule independently comprise about 15 to about 30 (e.g. about 15, 16, 17, 18, 19, 20, 21, 22, 23, 24, 25, 26, 27, 28, 29, or 30) nucleotides. In another embodiment, each of the two fragments of the siNA molecule independently comprise about 15 to about 40 (e.g. about 15, 16, 17, 18, 19, 20, 21, 22, 23, 24, 25, 26, 27, 28, 29, 30, 31, 23, 33, 34, 35, 36, 37, 38, 39, or 40) nucleotides. In a non-limiting example, each of the two fragments of the siNA molecule comprise about 21 nucleotides.

[0076] In one embodiment, the invention features a siNA molecule comprising at least one modified nucleotide, wherein the modified nucleotide is a 2′-deoxy-2′-fluoro nucleotide, 2′-deoxy-2′-fluoroarabino, 2′-O-trifluoromethyl nucleotide, 2′-O-ethyl-trifluoromethoxy nucleotide, or 2′-O-difluoromethoxy-ethoxy nucleotide or any other modified nucleoside/nucleotide described herein and in U.S. Ser. No. 10/981,966, filed Nov. 5, 2004, incorporated by reference herein. In one embodiment, the invention features a siNA molecule comprising at least two (e.g., 2, 3, 4, 5, 6, 7, 8, 9, 10, or more) modified nucleotides, wherein the modified nucleotide is selected from the group consisting of 2′-deoxy-2′-fluoro nucleotide, 2′-deoxy-2′-fluoroarabino, 2′-O-trifluoromethyl nucleotide, 2′-O-ethyl-trifluoromethoxy nucleotide, or 2′-O-difluoromethoxy-ethoxy nucleotide or any other modified nucleoside/nucleotide described herein and in U.S. Ser. No. 10/981,966, filed Nov. 5, 2004, incorporated by reference herein. The modified nucleotide/nucleoside can be the same or different. The siNA can be, for example, about 15 to about 40 nucleotides in length. In one embodiment, all pyrimidine nucleotides present in the siNA are 2′-deoxy-2′-fluoro, 2′-deoxy-2′-fluoroarabino, 2′-O-trifluoromethyl, 2′-O-ethyl-trifluoromethoxy, or 2′-O-difluoromethoxy-ethoxy, 4′-thio pyrimidine nucleotides. In one embodiment, the modified nucleotides in the siNA include at least one 2′-deoxy-2′-fluoro cytidine or 2′-deoxy-2′-fluoro uridine nucleotide. In another embodiment, the modified nucleotides in the siNA include at least one 2′-deoxy-2′-fluoro cytidine and at least one 2′-deoxy-2′-fluoro uridine nucleotides. In one embodiment, all uridine nucleotides present in the siNA are 2′-deoxy-2′-fluoro uridine nucleotides. In one embodiment, all cytidine nucleotides present in the siNA are 2′-deoxy-2′-fluoro cytidine nucleotides. In one embodiment, all adenosine nucleotides present in the siNA are 2′-deoxy-2′-fluoro adenosine nucleotides. In one embodiment, all guanosine nucleotides present in the siNA are 2′-deoxy-2′-fluoro guanosine nucleotides. The siNA can further comprise at least one modified internucleotidic linkage, such as phosphorothioate linkage. In one embodiment, the 2′-deoxy-2′-fluoronucleotides are present at specifically selected locations in the siNA that are sensitive to cleavage by ribonucleases, such as locations having pyrimidine nucleotides.

[0077] In one embodiment, the invention features a method of increasing the stability of a siNA molecule against cleavage by ribonucleases comprising introducing at least one modified nucleotide into the siNA molecule, wherein the modified nucleotide is a 2′-deoxy-2′-fluoro nucleotide. In one embodiment, all pyrimidine nucleotides present in the siNA are 2′-deoxy-2′-fluoro pyrimidine nucleotides. In one embodiment, the modified nucleotides in the siNA include at least one 2′-deoxy-2′-fluoro cytidine or 2′-deoxy-2′-fluoro uridine nucleotide. In another embodiment, the modified nucleotides in the siNA include at least one 2′-fluoro cytidine and at least one 2′-deoxy-2′-fluoro uridine nucleotides. In one embodiment, all uridine nucleotides present in the siNA are 2′-deoxy-2′-fluoro uridine nucleotides. In one embodiment, all cytidine nucleotides present in the siNA are 2′-deoxy-2′-fluoro cytidine nucleotides. In one embodiment, all adenosine nucleotides present in the siNA are 2′-deoxy-2′-fluoro adenosine nucleotides. In one embodiment, all guanosine nucleotides present in the siNA are 2′-deoxy-2′-fluoro guanosine nucleotides. The siNA can further comprise at least one modified internucleotidic linkage, such as a phosphorothioate linkage. In one embodiment, the 2′-deoxy-2′-fluoronucleotides are present at specifically selected locations in the siNA that are sensitive to cleavage by ribonucleases, such as locations having pyrimidine nucleotides.

[0078] In one embodiment, the invention features a method of increasing the stability of a siNA molecule against cleavage by ribonucleases comprising introducing at least one modified nucleotide into the siNA molecule, wherein the modified nucleotide is a 2′-deoxy-2′-fluoroarabino nucleotide. In one embodiment, all pyrimidine nucleotides present in the siNA are 2′-deoxy-2′-fluoroarabino pyrimidine nucleotides. In one embodiment, the modified nucleotides in the siNA include at least one 2′-deoxy-2′-fluoroarabino cytidine or 2′-deoxy-2′-fluoroarabino uridine nucleotide. In another embodiment, the modified nucleotides in the siNA include at least one 2′-fluoro cytidine and at least one 2′-deoxy-2′-fluoroarabino uridine nucleotides. In one embodiment, all uridine nucleotides present in the siNA are 2′-deoxy-2′-fluoroarabino uridine nucleotides. In one embodiment, all cytidine nucleotides present in the siNA are 2′-deoxy-2′-fluoroarabino cytidine nucleotides. In one embodiment, all adenosine nucleotides present in the siNA are 2′-deoxy-2′-fluoroarabino adenosine nucleotides. In one embodiment, all guanosine nucleotides present in the siNA are 2′-deoxy-2′-fluoroarabino guanosine nucleotides. The siNA can further comprise at least one modified internucleotidic linkage, such as a phosphorothioate linkage. In one embodiment, the 2′-deoxy-2′-fluoroarabinonucleotides are present at specifically selected locations in the siNA that are sensitive to cleavage by ribonucleases, such as locations having pyrimidine nucleotides.

[0079] In one embodiment, the invention features a double-stranded short interfering nucleic acid (siNA) molecule that down-regulates expression of a target gene or that directs cleavage of a target RNA, comprising a sense region and an antisense region, wherein the antisense region comprises a nucleotide sequence that is complementary to a nucleotide sequence of RNA encoded by the target gene or a portion thereof and the sense region comprises a nucleotide sequence that is complementary to the antisense region, and wherein the purine nucleotides present in the antisense region comprise 2′-deoxy-purine nucleotides. In an alternative embodiment, the purine nucleotides present in the antisense region comprise 2′-O-methyl purine nucleotides. In either of the above embodiments, the antisense region can comprise a phosphorothioate internucleotide linkage at the 3′ end of the antisense region. Alternatively, in either of the above embodiments, the antisense region can comprise a glyceryl modification at the 3′ end of the antisense region. In another embodiment of any of the above-described siNA molecules, any nucleotides present in a non-complementary region of the antisense strand (e.g. overhang region) are 2′-deoxy nucleotides.

[0080] In one embodiment, the antisense region of a siNA molecule of the invention comprises sequence complementary to a portion of an endogenous transcript having sequence unique to a particular disease or trait related allele in a subject or organism, such as sequence comprising a single nucleotide polymorphism (SNP) associated with the disease or trait specific allele. As such, the antisense region of a siNA molecule of the invention can comprise sequence complementary to sequences that are unique to a particular allele to provide specificity in mediating selective RNAi against the disease, condition, or trait related allele.

[0081] In one embodiment, the invention features a double-stranded short interfering nucleic acid (siNA) molecule that down-regulates expression of a target gene or that directs cleavage of a target RNA, wherein the siNA molecule is assembled from two separate oligonucleotide fragments wherein one fragment comprises the sense region and the second fragment comprises the antisense region of the siNA molecule. In one embodiment, each strand of the double stranded siNA molecule is about 21 nucleotides long where about 19 nucleotides of each fragment of the siNA molecule are base-paired to the complementary nucleotides of the other fragment of the siNA molecule, wherein at least two 3′ terminal nucleotides of each fragment of the siNA molecule are not base-paired to the nucleotides of the other fragment of the siNA molecule. In another embodiment, the siNA molecule is a double stranded nucleic acid molecule, where each strand is about 19 nucleotide long and where the nucleotides of each fragment of the siNA molecule are base-paired to the complementary nucleotides of the other fragment of the siNA molecule to form at least about 15 (e.g., 15, 16, 17, 18, or 19) base pairs, wherein one or both ends of the siNA molecule are blunt ends. In one embodiment, each of the two 3′ terminal nucleotides of each fragment of the siNA molecule is a 2′-deoxy-pyrimidine nucleotide, such as a 2′-deoxy-thymidine. In one embodiment, each of the two 3′ terminal nucleotides of each fragment of the siNA molecule is a 2′-O-methylpyrimidine nucleotide, such as a 2′-O-methyl uridine, cytidine, or thymidine. In another embodiment, all nucleotides of each fragment of the siNA molecule are base-paired to the complementary nucleotides of the other fragment of the siNA molecule. In another embodiment, the siNA molecule is a double stranded nucleic acid molecule of about 19 to about 25 base pairs having a sense region and an antisense region, where about 19 nucleotides of the antisense region are base-paired to the nucleotide sequence or a portion thereof of the RNA encoded by the target gene. In another embodiment, about 21 nucleotides of the antisense region are base-paired to the nucleotide sequence or a portion thereof of the RNA encoded by the target gene. In any of the above embodiments, the 5′-end of the fragment comprising said antisense region can optionally include a phosphate group.

[0082] In one embodiment, the invention features a double-stranded short interfering nucleic acid (siNA) molecule that inhibits the expression of a target RNA sequence, wherein the siNA molecule does not contain any ribonucleotides and wherein each strand of the double-stranded siNA molecule is about 15 to about 30 nucleotides. In one embodiment, the siNA molecule is 21 nucleotides in length. Examples of non-ribonucleotide containing siNA constructs are combinations of stabilization chemistries shown in Table IV in any combination of Sense/Antisense chemistries, such as Stab 7/8, Stab 7/11, Stab 8/8, Stab 18/8, Stab 18/11, Stab 12/13, Stab 7/13, Stab 18/13, Stab 7/19, Stab 8/19, Stab 18/19, Stab 7/20, Stab 8/20, Stab 18/20, Stab 7/32, Stab 8/32, or Stab 18/32 (e.g., any siNA having Stab 7, 8, 11, 12, 13, 14, 15, 17, 18, 19, 20, or 32 sense or antisense strands or any combination thereof). Herein, numeric Stab chemistries can include both 2′-fluoro and 2′-OCF3 versions of the chemistries shown in Table IV. For example, “Stab 7/8” refers to both Stab 7/8 and Stab 7F/8F etc. In one embodiment, the invention features a chemically synthesized double stranded RNA molecule that directs cleavage of a target RNA via RNA interference, wherein each strand of said RNA molecule is about 15 to about 30 nucleotides in length; one strand of the RNA molecule comprises nucleotide sequence having sufficient complementarity to the target RNA for the RNA molecule to direct cleavage of the target RNA via RNA interference; and wherein at least one strand of the RNA molecule optionally comprises one or more chemically modified nucleotides described herein, such as without limitation deoxynucleotides, 2′-O-methyl nucleotides, 2′-deoxy-2′-fluoro nucleotides, 2′-deoxy-2′-fluoroarabino, 2′-O-methoxyethyl nucleotides, 4′-thio nucleotides, 2′-O-trifluoromethyl nucleotides, 2′-O-ethyl-trifluoromethoxy nucleotides, 2′-O-difluoromethoxy-ethoxy nucleotides, etc. or any combination thereof.

[0083] In one embodiment, a target RNA of the invention comprises sequence encoding a protein, such as an HCV or HCV pathway/host RNA encoding a HCV or HCV pathway/host protein.

[0084] In one embodiment, target RNA of the invention comprises non-coding RNA sequence (e.g., miRNA, snRNA, siRNA etc.), see for example Mattick, 2005, Science, 309, 1527-1528; Claverie, 2005, Science, 309, 1529-1530; Sethupathy et al., 2006, RNA, 12, 192-197; and Czech, 2006 NEJM, 354, 11: 1194-1195.

[0085] In one embodiment, the invention features a medicament comprising a siNA molecule of the invention.

[0086] In one embodiment, the invention features an active ingredient comprising a siNA molecule of the invention.

[0087] In one embodiment, the invention features the use of a double-stranded short interfering nucleic acid (siNA) molecule to inhibit, down-regulate, or reduce expression of a target gene, wherein the siNA molecule comprises one or more chemical modifications and each strand of the double-stranded siNA is independently about 15 to about 30 or more (e.g., about 15, 16, 17, 18, 19, 20, 21, 22, 23, 24, 25, 26, 27, 28, 29 or 30 or more) nucleotides long. In one embodiment, the siNA molecule of the invention is a double stranded nucleic acid molecule comprising one or more chemical modifications, where each of the two fragments of the siNA molecule independently comprise about 15 to about 40 (e.g. about 15, 16, 17, 18, 19, 20, 21, 22, 23, 24, 25, 26, 27, 28, 29, 30, 31, 23, 33, 34, 35, 36, 37, 38, 39, or 40) nucleotides and where one of the strands comprises at least 15 nucleotides that are complementary to nucleotide sequence of target encoding RNA or a portion thereof. In a non-limiting example, each of the two fragments of the siNA molecule comprise about 21 nucleotides. In another embodiment, the siNA molecule is a double stranded nucleic acid molecule comprising one or more chemical modifications, where each strand is about 21 nucleotide long and where about 19 nucleotides of each fragment of the siNA molecule are base-paired to the complementary nucleotides of the other fragment of the siNA molecule, wherein at least two 3′ terminal nucleotides of each fragment of the siNA molecule are not base-paired to the nucleotides of the other fragment of the siNA molecule. In another embodiment, the siNA molecule is a double stranded nucleic acid molecule comprising one or more chemical modifications, where each strand is about 19 nucleotide long and where the nucleotides of each fragment of the siNA molecule are base-paired to the complementary nucleotides of the other fragment of the siNA molecule to form at least about 15 (e.g., 15, 16, 17, 18, or 19) base pairs, wherein one or both ends of the siNA molecule are blunt ends. In one embodiment, each of the two 3′ terminal nucleotides of each fragment of the siNA molecule is a 2′-deoxy-pyrimidine nucleotide, such as a 2′-deoxy-thymidine. In one embodiment, each of the two 3′ terminal nucleotides of each fragment of the siNA molecule is a 2′-O-methylpyrimidine nucleotide, such as a 2′-O-methyl uridine, cytidine, or thymidine. In another embodiment, all nucleotides of each fragment of the siNA molecule are base-paired to the complementary nucleotides of the other fragment of the siNA molecule. In another embodiment, the siNA molecule is a double stranded nucleic acid molecule of about 19 to about 25 base pairs having a sense region and an antisense region and comprising one or more chemical modifications, where about 19 nucleotides of the antisense region are base-paired to the nucleotide sequence or a portion thereof of the RNA encoded by the target gene. In another embodiment, about 21 nucleotides of the antisense region are base-paired to the nucleotide sequence or a portion thereof of the RNA encoded by the target gene. In any of the above embodiments, the 5′-end of the fragment comprising said antisense region can optionally include a phosphate group.

[0088] In one embodiment, the invention features the use of a double-stranded short interfering nucleic acid (siNA) molecule that inhibits, down-regulates, or reduces expression of a target gene, wherein one of the strands of the double-stranded siNA molecule is an antisense strand which comprises nucleotide sequence that is complementary to nucleotide sequence of target RNA or a portion thereof, the other strand is a sense strand which comprises nucleotide sequence that is complementary to a nucleotide sequence of the antisense strand. In one embodiment, each strand has at least two (e.g., 2, 3, 4, 5, or more) chemical modifications, which can be the same or different, such as nucleotide, sugar, base, or backbone modifications. In one embodiment, a majority of the pyrimidine nucleotides present in the double-stranded siNA molecule comprises a sugar modification. In one embodiment, a majority of the purine nucleotides present in the double-stranded siNA molecule comprises a sugar modification.

[0089] In one embodiment, the invention features a double-stranded short interfering nucleic acid (siNA) molecule that inhibits, down-regulates, or reduces expression of a target gene, wherein one of the strands of the double-stranded siNA molecule is an antisense strand which comprises nucleotide sequence that is complementary to nucleotide sequence of target RNA or a portion thereof, wherein the other strand is a sense strand which comprises nucleotide sequence that is complementary to a nucleotide sequence of the antisense strand. In one embodiment, each strand has at least two (e.g., 2, 3, 4, 5, or more) chemical modifications, which can be the same or different, such as nucleotide, sugar, base, or backbone modifications. In one embodiment, a majority of the pyrimidine nucleotides present in the double-stranded siNA molecule comprises a sugar modification. In one embodiment, a majority of the purine nucleotides present in the double-stranded siNA molecule comprises a sugar modification.

[0090] In one embodiment, the invention features a double-stranded short interfering nucleic acid (siNA) molecule that inhibits, down-regulates, or reduces expression of a target gene, wherein one of the strands of the double-stranded siNA molecule is an antisense strand which comprises nucleotide sequence that is complementary to nucleotide sequence of target RNA that encodes a protein or portion thereof, the other strand is a sense strand which comprises nucleotide sequence that is complementary to a nucleotide sequence of the antisense strand and wherein a majority of the pyrimidine nucleotides present in the double-stranded siNA molecule comprises a sugar modification. In one embodiment, each strand of the siNA molecule comprises about 15 to about 30 or more (e.g., about 15, 16, 17, 18, 19, 20, 21, 22, 23, 24, 25, 26, 27, 28, 29, or 30 or more) nucleotides, wherein each strand comprises at least about 15 nucleotides that are complementary to the nucleotides of the other strand. In one embodiment, the siNA molecule is assembled from two oligonucleotide fragments, wherein one fragment comprises the nucleotide sequence of the antisense strand of the siNA molecule and a second fragment comprises nucleotide sequence of the sense region of the siNA molecule. In one embodiment, the sense strand is connected to the antisense strand via a linker molecule, such as a polynucleotide linker or a non-nucleotide linker. In a further embodiment, the pyrimidine nucleotides present in the sense strand are 2′-deoxy-2′fluoro pyrimidine nucleotides and the purine nucleotides present in the sense region are 2′-deoxy purine nucleotides. In another embodiment, the pyrimidine nucleotides present in the sense strand are 2′-deoxy-2′fluoro pyrimidine nucleotides and the purine nucleotides present in the sense region are 2′-O-methyl purine nucleotides. In still another embodiment, the pyrimidine nucleotides present in the antisense strand are 2′-deoxy-2′-fluoro pyrimidine nucleotides and any purine nucleotides present in the antisense strand are 2′-deoxy purine nucleotides. In another embodiment, the antisense strand comprises one or more 2′-deoxy-2′-fluoro pyrimidine nucleotides and one or more 2′-O-methyl purine nucleotides. In another embodiment, the pyrimidine nucleotides present in the antisense strand are 2′-deoxy-2′-fluoro pyrimidine nucleotides and any purine nucleotides present in the antisense strand are 2′-O-methyl purine nucleotides. In a further embodiment the sense strand comprises a 3′-end and a 5′-end, wherein a terminal cap moiety (e.g., an inverted deoxy abasic moiety or inverted deoxy nucleotide moiety such as inverted thymidine) is present at the 5′-end, the 3′-end, or both of the 5′ and 3′ ends of the sense strand. In another embodiment, the antisense strand comprises a phosphorothioate internucleotide linkage at the 3′ end of the antisense strand. In another embodiment, the antisense strand comprises a glyceryl modification at the 3′ end. In another embodiment, the 5′-end of the antisense strand optionally includes a phosphate group.

[0091] In any of the above-described embodiments of a double-stranded short interfering nucleic acid (siNA) molecule that inhibits expression of a target gene, wherein a majority of the pyrimidine nucleotides present in the double-stranded siNA molecule comprises a sugar modification, each of the two strands of the siNA molecule can comprise about 15 to about 30 or more (e.g., about 15, 16, 17, 18, 19, 20, 21, 22, 23, 24, 25, 26, 27, 28, 29, or 30 or more) nucleotides. In one embodiment, about 15 to about 30 or more (e.g., about 15, 16, 17, 18, 19, 20, 21, 22, 23, 24, 25, 26, 27, 28, 29, or 30 or more) nucleotides of each strand of the siNA molecule are base-paired to the complementary nucleotides of the other strand of the siNA molecule. In another embodiment, about 15 to about 30 or more (e.g., about 15, 16, 17, 18, 19, 20, 21, 22, 23, 24, 25, 26, 27, 28, 29, or 30 or more) nucleotides of each strand of the siNA molecule are base-paired to the complementary nucleotides of the other strand of the siNA molecule, wherein at least two 3′ terminal nucleotides of each strand of the siNA molecule are not base-paired to the nucleotides of the other strand of the siNA molecule. In another embodiment, each of the two 3′ terminal nucleotides of each fragment of the siNA molecule is a 2′-deoxy-pyrimidine, such as 2′-deoxy-thymidine. In one embodiment, each strand of the siNA molecule is base-paired to the complementary nucleotides of the other strand of the siNA molecule. In one embodiment, about 15 to about 30 (e.g., about 15, 16, 17, 18, 19, 20, 21, 22, 23, 24, 25, 26, 27, 28, 29, or 30) nucleotides of the antisense strand are base-paired to the nucleotide sequence of the target RNA or a portion thereof. In one embodiment, about 18 to about 25 (e.g., about 18, 19, 20, 21, 22, 23, 24, or 25) nucleotides of the antisense strand are base-paired to the nucleotide sequence of the target RNA or a portion thereof.

[0092] In one embodiment, the invention features a double-stranded short interfering nucleic acid (siNA) molecule that inhibits expression of a target gene, wherein one of the strands of the double-stranded siNA molecule is an antisense strand which comprises nucleotide sequence that is complementary to nucleotide sequence of target RNA or a portion thereof, the other strand is a sense strand which comprises nucleotide sequence that is complementary to a nucleotide sequence of the antisense strand. In one embodiment, each strand has at least two (e.g., 2, 3, 4, 5, or more) different chemical modifications, such as nucleotide sugar, base, or backbone modifications. In one embodiment, a majority of the pyrimidine nucleotides present in the double-stranded siNA molecule comprises a sugar modification. In one embodiment, a majority of the purine nucleotides present in the double-stranded siNA molecule comprises a sugar modification. In one embodiment, the 5′-end of the antisense strand optionally includes a phosphate group.

[0093] In one embodiment, the invention features a double-stranded short interfering nucleic acid (siNA) molecule that inhibits expression of a target gene, wherein one of the strands of the double-stranded siNA molecule is an antisense strand which comprises nucleotide sequence that is complementary to nucleotide sequence of target RNA or a portion thereof, the other strand is a sense strand which comprises nucleotide sequence that is complementary to a nucleotide sequence of the antisense strand and wherein a majority of the pyrimidine nucleotides present in the double-stranded siNA molecule comprises a sugar modification, and wherein the nucleotide sequence or a portion thereof of the antisense strand is complementary to a nucleotide sequence of the untranslated region or a portion thereof of the target RNA.

[0094] In one embodiment, the invention features a double-stranded short interfering nucleic acid (siNA) molecule that inhibits expression of a target gene, wherein one of the strands of the double-stranded siNA molecule is an antisense strand which comprises nucleotide sequence that is complementary to nucleotide sequence of target RNA or a portion thereof, wherein the other strand is a sense strand which comprises nucleotide sequence that is complementary to a nucleotide sequence of the antisense strand, wherein a majority of the pyrimidine nucleotides present in the double-stranded siNA molecule comprises a sugar modification, and wherein the nucleotide sequence of the antisense strand is complementary to a nucleotide sequence of the target RNA or a portion thereof that is present in the target RNA.

[0095] In one embodiment, the invention features a composition comprising a siNA molecule of the invention and a pharmaceutically acceptable carrier or diluent. In another embodiment, the invention features two or more differing siNA molecules of the invention (e.g. siNA molecules that target different regions of target RNA or siNA molecules that target HCV pathway RNA) and a pharmaceutically acceptable carrier or diluent.

[0096] In a non-limiting example, the introduction of chemically-modified nucleotides into nucleic acid molecules provides a powerful tool in overcoming potential limitations of in vivo stability and bioavailability inherent to native RNA molecules that are delivered exogenously. For example, the use of chemically-modified nucleic acid molecules can enable a lower dose of a particular nucleic acid molecule for a given therapeutic effect since chemically-modified nucleic acid molecules tend to have a longer half-life in serum. Furthermore, certain chemical modifications can improve the bioavailability of nucleic acid molecules by targeting particular cells or tissues and/or improving cellular uptake of the nucleic acid molecule. Therefore, even if the activity of a chemically-modified nucleic acid molecule is reduced as compared to a native nucleic acid molecule, for example, when compared to an all-RNA nucleic acid molecule, the overall activity of the modified nucleic acid molecule can be greater than that of the native molecule due to improved stability and/or delivery of the molecule. Unlike native unmodified siNA, chemically-modified siNA can also minimize the possibility of activating interferon activity or immunostimulation in humans. These properties therefore improve upon native siRNA or minimally modified siRNA's ability to mediate RNAi in various in vitro and in vivo settings, including use in both research and therapeutic applications. Applicant describes herein chemically modified siNA molecules with improved RNAi activity compared to corresponding unmodified or minimally modified siRNA molecules. The chemically modified siNA motifs disclosed herein provide the capacity to maintain RNAi activity that is substantially similar to unmodified or minimally modified active siRNA (see for example Elbashir et al., 2001, EMBO J., 20:6877-6888) while at the same time providing nuclease resistance and pharmacoketic properties suitable for use in therapeutic applications.

[0097] In any of the embodiments of siNA molecules described herein, the antisense region of a siNA molecule of the invention can comprise a phosphorothioate internucleotide linkage at the 3′-end of said antisense region. In any of the embodiments of siNA molecules described herein, the antisense region can comprise about one to about five phosphorothioate internucleotide linkages at the 5′-end of said antisense region. In any of the embodiments of siNA molecules described herein, the 3′-terminal nucleotide overhangs of a siNA molecule of the invention can comprise ribonucleotides or deoxyribonucleotides that are chemically-modified at a nucleic acid sugar, base, or backbone. In any of the embodiments of siNA molecules described herein, the 3′-terminal nucleotide overhangs can comprise one or more universal base ribonucleotides. In any of the embodiments of siNA molecules described herein, the 3′-terminal nucleotide overhangs can comprise one or more acyclic nucleotides.

[0098] One embodiment of the invention provides an expression vector comprising a nucleic acid sequence encoding at least one siNA molecule of the invention in a manner that allows expression of the nucleic acid molecule. Another embodiment of the invention provides a mammalian cell comprising such an expression vector. The mammalian cell can be a human cell. The siNA molecule of the expression vector can comprise a sense region and an antisense region. The antisense region can comprise sequence complementary to a RNA or DNA sequence encoding a target and the sense region can comprise sequence complementary to the antisense region. The siNA molecule can comprise two distinct strands having complementary sense and antisense regions. The siNA molecule can comprise a single strand having complementary sense and antisense regions.

[0099] In one embodiment, the invention features a chemically-modified short interfering nucleic acid (siNA) molecule capable of mediating RNA interference (RNAi) inside a cell or reconstituted in vitro system, wherein the chemical modification comprises one or more (e.g., about 1, 2, 3, 4, 5, 6, 7, 8, 9, 10, or more) nucleotides comprising a backbone modified internucleotide linkage having Formula I:

[chemical structure]

[0100] wherein each R1 and R2 is independently any nucleotide, non-nucleotide, or polynucleotide which can be naturally-occurring or chemically-modified and which can be included in the structure of the siNA molecule or serve as a point of attachment to the siNA molecule, each X and Y is independently O, S, N, alkyl, or substituted alkyl, each Z and W is independently O, S, N, alkyl, substituted alkyl, O-alkyl, S-alkyl, alkaryl, aralkyl, or acetyl and wherein W, X, Y, and Z are optionally not all O. In another embodiment, a backbone modification of the invention comprises a phosphonoacetate and/or thiophosphonoacetate internucleotide linkage (see for example Sheehan et al., 2003, Nucleic Acids Research, 31, 4109-4118).

[0101] The chemically-modified internucleotide linkages having Formula I, for example, wherein any Z, W, X, and/or Y independently comprises a sulphur atom, can be present in one or both oligonucleotide strands of the siNA duplex, for example, in the sense strand, the antisense strand, or both strands. The siNA molecules of the invention can comprise one or more (e.g., about 1, 2, 3, 4, 5, 6, 7, 8, 9, 10, or more) chemically-modified internucleotide linkages having Formula I at the 3′-end, the 5′-end, or both of the 3′ and 5′-ends of the sense strand, the antisense strand, or both strands. For example, an exemplary siNA molecule of the invention can comprise about 1 to about 5 or more (e.g., about 1, 2, 3, 4, 5, or more) chemically-modified internucleotide linkages having Formula I at the 5′-end of the sense strand, the antisense strand, or both strands. In another non-limiting example, an exemplary siNA molecule of the invention can comprise one or more (e.g., about 1, 2, 3, 4, 5, 6, 7, 8, 9, 10, or more) pyrimidine nucleotides with chemically-modified internucleotide linkages having Formula I in the sense strand, the antisense strand, or both strands. In yet another non-limiting example, an exemplary siNA molecule of the invention can comprise one or more (e.g., about 1, 2, 3, 4, 5, 6, 7, 8, 9, 10, or more) purine nucleotides with chemically-modified internucleotide linkages having Formula I in the sense strand, the antisense strand, or both strands. In another embodiment, a siNA molecule of the invention having internucleotide linkage(s) of Formula I also comprises a chemically-modified nucleotide or non-nucleotide having any of Formulae I-VII.

[0102] In one embodiment, the invention features a chemically-modified short interfering nucleic acid (siNA) molecule capable of mediating RNA interference (RNAi) inside a cell or reconstituted in vitro system, wherein the chemical modification comprises one or more (e.g., about 1, 2, 3, 4, 5, 6, 7, 8, 9, 10, or more) nucleotides or non-nucleotides having Formula II:

[chemical structure]

wherein each R3, R4, R5, R6, R7, R8, R10, R11 and R12 is independently H, OH, alkyl, substituted alkyl, alkaryl or aralkyl, F, Cl, Br, CN, CF3, OCF3, OCH3, OCN, O-alkyl, S-alkyl, N-alkyl, O-alkenyl, S-alkenyl, N-alkenyl, SO-alkyl, alkyl-OSH, alkyl-OH, O-alkyl-OH, O-alkyl-SH, S-alkyl-OH, S-alkyl-SH, alkyl-5-alkyl, alkyl-O-alkyl, ONO2, NO2, N3, NH2, aminoalkyl, aminoacid, aminoacyl, ONH2, O-aminoalkyl, O-aminoacid, O-aminoacyl, heterocycloalkyl, heterocycloalkaryl, aminoalkylamino, polyalklylamino, substituted silyl, or a group having any of Formula I, II, III, IV, V, VI and/or VII, any of which can be included in the structure of the siNA molecule or serve as a point of attachment to the siNA molecule; R9 is O, S, CH2, S═O, CHF, or CF2, and B is a nucleosidic base such as adenine, guanine, uracil, cytosine, thymine, 2-aminoadenosine, 5-methylcytosine, 2,6-diaminopurine, or any other non-naturally occurring base that can be complementary or non-complementary to target RNA or a non-nucleosidic base such as phenyl, naphthyl, 3-nitropyrrole, 5-nitroindole, nebularine, pyridone, pyridinone, or any other non-naturally occurring universal base that can be complementary or non-complementary to target RNA. In one embodiment, R3 and/or R7 comprises a conjugate moiety and a linker (e.g., a nucleotide or non-nucleotide linker as described herein or otherwise known in the art). Non-limiting examples of conjugate moieties include ligands for cellular receptors, such as peptides derived from naturally occurring protein ligands; protein localization sequences, including cellular ZIP code sequences; antibodies; nucleic acid aptamers; vitamins and other co-factors, such as folate and N-acetylgalactosamine; polymers, such as polyethyleneglycol (PEG); phospholipids; cholesterol; steroids, and polyamines, such as PEI, spermine or spermidine. In one embodiment, a nucleotide of the invention having Formula II is a 2′-deoxy-2′-fluoro nucleotide. In one embodiment, a nucleotide of the invention having Formula II is a 2′-O-methyl nucleotide. In one embodiment, a nucleotide of the invention having Formula II is a 2′-deoxy nucleotide.

[0103] The chemically-modified nucleotide or non-nucleotide of Formula II can be present in one or both oligonucleotide strands of the siNA duplex, for example in the sense strand, the antisense strand, or both strands. The siNA molecules of the invention can comprise one or more chemically-modified nucleotides or non-nucleotides of Formula II at the 3′-end, the 5′-end, or both of the 3′ and 5′-ends of the sense strand, the antisense strand, or both strands. For example, an exemplary siNA molecule of the invention can comprise about 1 to about 5 or more (e.g., about 1, 2, 3, 4, 5, or more) chemically-modified nucleotides or non-nucleotides of Formula II at the 5′-end of the sense strand, the antisense strand, or both strands. In another non-limiting example, an exemplary siNA molecule of the invention can comprise about 1 to about 5 or more (e.g., about 1, 2, 3, 4, 5, or more) chemically-modified nucleotides or non-nucleotides of Formula II at the 3′-end of the sense strand, the antisense strand, or both strands.

[0104] In one embodiment, the invention features a chemically-modified short interfering nucleic acid (siNA) molecule capable of mediating RNA interference (RNAi) inside a cell or reconstituted in vitro system, wherein the chemical modification comprises one or more (e.g., about 1, 2, 3, 4, 5, 6, 7, 8, 9, 10, or more) nucleotides or non-nucleotides having Formula III:

[chemical structure]

wherein each R3, R4, R5, R6, R7, R8, R10, R11 and R12 is independently H, OH, alkyl, substituted alkyl, alkaryl or aralkyl, F, Cl, Br, CN, CF3, OCF3, OCH3, OCN, O-alkyl, S-alkyl, N-alkyl, O-alkenyl, S-alkenyl, N-alkenyl, SO-alkyl, alkyl-OSH, alkyl-OH, O-alkyl-OH, O-alkyl-SH, S-alkyl-OH, S-alkyl-SH, alkyl-5-alkyl, alkyl-O-alkyl, ONO2, NO2, N3, NH2, aminoalkyl, aminoacid, aminoacyl, ONH2, O-aminoalkyl, O-aminoacid, O-aminoacyl, heterocycloalkyl, heterocycloalkaryl, aminoalkylamino, polyalklylamino, substituted silyl, or a group having any of Formula I, II, III, IV, V, VI and/or VII, any of which can be included in the structure of the siNA molecule or serve as a point of attachment to the siNA molecule; R9 is O, S, CH2, S═O, CHF, or CF2, and B is a nucleosidic base such as adenine, guanine, uracil, cytosine, thymine, 2-aminoadenosine, 5-methylcytosine, 2,6-diaminopurine, or any other non-naturally occurring base that can be employed to be complementary or non-complementary to target RNA or a non-nucleosidic base such as phenyl, naphthyl, 3-nitropyrrole, 5-nitroindole, nebularine, pyridone, pyridinone, or any other non-naturally occurring universal base that can be complementary or non-complementary to target RNA. In one embodiment, R3 and/or R7 comprises a conjugate moiety and a linker (e.g., a nucleotide or non-nucleotide linker as described herein or otherwise known in the art). Non-limiting examples of conjugate moieties include ligands for cellular receptors, such as peptides derived from naturally occurring protein ligands; protein localization sequences, including cellular ZIP code sequences; antibodies; nucleic acid aptamers; vitamins and other co-factors, such as folate and N-acetylgalactosamine; polymers, such as polyethyleneglycol (PEG); phospholipids; cholesterol; steroids, and polyamines, such as PEI, spermine or spermidine.

[0105] The chemically-modified nucleotide or non-nucleotide of Formula III can be present in one or both oligonucleotide strands of the siNA duplex, for example, in the sense strand, the antisense strand, or both strands. The siNA molecules of the invention can comprise one or more chemically-modified nucleotides or non-nucleotides of Formula III at the 3′-end, the 5′-end, or both of the 3′ and 5′-ends of the sense strand, the antisense strand, or both strands. For example, an exemplary siNA molecule of the invention can comprise about 1 to about 5 or more (e.g., about 1, 2, 3, 4, 5, or more) chemically-modified nucleotide(s) or non-nucleotide(s) of Formula III at the 5′-end of the sense strand, the antisense strand, or both strands. In another non-limiting example, an exemplary siNA molecule of the invention can comprise about 1 to about 5 or more (e.g., about 1, 2, 3, 4, 5, or more) chemically-modified nucleotide or non-nucleotide of Formula III at the 3′-end of the sense strand, the antisense strand, or both strands.

[0106] In another embodiment, a siNA molecule of the invention comprises a nucleotide having Formula II or III, wherein the nucleotide having Formula II or III is in an inverted configuration. For example, the nucleotide having Formula II or III is connected to the siNA construct in a 3′-3′, 3′-2′, 2′-3′, or 5′-5′ configuration, such as at the 3′-end, the 5′-end, or both of the 3′ and 5′-ends of one or both siNA strands.

[0107] In one embodiment, the invention features a chemically-modified short interfering nucleic acid (siNA) molecule capable of mediating RNA interference (RNAi) inside a cell or reconstituted in vitro system, wherein the chemical modification comprises a 5′-terminal phosphate group having Formula IV:

[chemical structure]

wherein each X and Y is independently O, S, N, alkyl, substituted alkyl, or alkylhalo; wherein each Z and W is independently O, S, N, alkyl, substituted alkyl, O-alkyl, S-alkyl, alkaryl, aralkyl, alkylhalo, or acetyl; and wherein W, X, Y and Z are optionally not all O and Y serves as a point of attachment to the siNA molecule.

[0108] In one embodiment, the invention features a siNA molecule having a 5′-terminal phosphate group having Formula IV on the target-complementary strand, for example, a strand complementary to a target RNA, wherein the siNA molecule comprises an all RNA siNA molecule. In another embodiment, the invention features a siNA molecule having a 5′-terminal phosphate group having Formula IV on the target-complementary strand wherein the siNA molecule also comprises about 1 to about 3 (e.g., about 1, 2, or 3) nucleotide 3′-terminal nucleotide overhangs having about 1 to about 4 (e.g., about 1, 2, 3, or 4) deoxyribonucleotides on the 3′-end of one or both strands. In another embodiment, a 5′-terminal phosphate group having Formula IV is present on the target-complementary strand of a siNA molecule of the invention, for example a siNA molecule having chemical modifications having any of Formulae I-VII.

[0109] In one embodiment, the invention features a chemically-modified short interfering nucleic acid (siNA) molecule capable of mediating RNA interference (RNAi) inside a cell or reconstituted in vitro system, wherein the chemical modification comprises one or more phosphorothioate internucleotide linkages. For example, in a non-limiting example, the invention features a chemically-modified short interfering nucleic acid (siNA) having about 1, 2, 3, 4, 5, 6, 7, 8 or more phosphorothioate internucleotide linkages in one siNA strand. In yet another embodiment, the invention features a chemically-modified short interfering nucleic acid (siNA) individually having about 1, 2, 3, 4, 5, 6, 7, 8 or more phosphorothioate internucleotide linkages in both siNA strands. The phosphorothioate internucleotide linkages can be present in one or both oligonucleotide strands of the siNA duplex, for example in the sense strand, the antisense strand, or both strands. The siNA molecules of the invention can comprise one or more phosphorothioate internucleotide linkages at the 3′-end, the 5′-end, or both of the 3′- and 5′-ends of the sense strand, the antisense strand, or both strands. For example, an exemplary siNA molecule of the invention can comprise about 1 to about 5 or more (e.g., about 1, 2, 3, 4, 5, or more) consecutive phosphorothioate internucleotide linkages at the 5′-end of the sense strand, the antisense strand, or both strands. In another non-limiting example, an exemplary siNA molecule of the invention can comprise one or more (e.g., about 1, 2, 3, 4, 5, 6, 7, 8, 9, 10, or more) pyrimidine phosphorothioate internucleotide linkages in the sense strand, the antisense strand, or both strands. In yet another non-limiting example, an exemplary siNA molecule of the invention can comprise one or more (e.g., about 1, 2, 3, 4, 5, 6, 7, 8, 9, 10, or more) purine phosphorothioate internucleotide linkages in the sense strand, the antisense strand, or both strands.

[0110] Each strand of the double stranded siNA molecule can have one or more chemical modifications such that each strand comprises a different pattern of chemical modifications. Several non-limiting examples of modification schemes that could give rise to different patterns of modifications are provided herein.

[0111] In one embodiment, the invention features a siNA molecule, wherein the sense strand comprises one or more, for example, about 1, 2, 3, 4, 5, 6, 7, 8, 9, 10, or more phosphorothioate internucleotide linkages, and/or one or more (e.g., about 1, 2, 3, 4, 5, 6, 7, 8, 9, 10 or more) 2′-deoxy, 2′-O-methyl, 2′-deoxy-2′-fluoro, 2′-O-trifluoromethyl, 2′-O-ethyl-trifluoromethoxy, 2′-O-difluoromethoxy-ethoxy and/or about one or more (e.g., about 1, 2, 3, 4, 5, 6, 7, 8, 9, 10 or more) universal base modified nucleotides, and optionally a terminal cap molecule at the 3′-end, the 5′-end, or both of the 3′- and 5′-ends of the sense strand; and wherein the antisense strand comprises about 1 to about 10 or more, specifically about 1, 2, 3, 4, 5, 6, 7, 8, 9, 10, or more phosphorothioate internucleotide linkages, and/or one or more (e.g., about 1, 2, 3, 4, 5, 6, 7, 8, 9, 10 or more) 2′-deoxy, 2′-O-methyl, 2′-deoxy-2′-fluoro, 2′-O-trifluoromethyl, 2′-O-ethyl-trifluoromethoxy, 2′-O-difluoromethoxy-ethoxy, 4′-thio and/or one or more (e.g., about 1, 2, 3, 4, 5, 6, 7, 8, 9, 10 or more) universal base modified nucleotides, and optionally a terminal cap molecule at the 3′-end, the 5′-end, or both of the 3′- and 5′-ends of the antisense strand. In another embodiment, one or more, for example about 1, 2, 3, 4, 5, 6, 7, 8, 9, 10, or more, pyrimidine nucleotides of the sense and/or antisense siNA strand are chemically-modified with 2′-deoxy, 2′-O-methyl, 2′-O-trifluoromethyl, 2′-O-ethyl-trifluoromethoxy, 2′-O-difluoromethoxy-ethoxy, 4′-thio and/or 2′-deoxy-2′-fluoro nucleotides, with or without one or more, for example about 1, 2, 3, 4, 5, 6, 7, 8, 9, 10, or more, phosphorothioate internucleotide linkages and/or a terminal cap molecule at the 3′-end, the 5′-end, or both of the 3′- and 5′-ends, being present in the same or different strand.

[0112] In another embodiment, the invention features a siNA molecule, wherein the sense strand comprises about 1 to about 5, specifically about 1, 2, 3, 4, or 5 phosphorothioate internucleotide linkages, and/or one or more (e.g., about 1, 2, 3, 4, 5, or more) 2′-deoxy, 2′-O-methyl, 2′-deoxy-2′-fluoro, 2′-O-trifluoromethyl, 2′-O-ethyl-trifluoromethoxy, 2′-O-difluoromethoxy-ethoxy, 4′-thio and/or one or more (e.g., about 1, 2, 3, 4, 5, or more) universal base modified nucleotides, and optionally a terminal cap molecule at the 3-end, the 5′-end, or both of the 3′- and 5′-ends of the sense strand; and wherein the antisense strand comprises about 1 to about 5 or more, specifically about 1, 2, 3, 4, 5, or more phosphorothioate internucleotide linkages, and/or one or more (e.g., about 1, 2, 3, 4, 5, 6, 7, 8, 9, 10 or more) 2′-deoxy, 2′-O-methyl, 2′-deoxy-2′-fluoro, 2′-O-trifluoromethyl, 2′-O-ethyl-trifluoromethoxy, 2′-O-difluoromethoxy-ethoxy, 4′-thio and/or one or more (e.g., about 1, 2, 3, 4, 5, 6, 7, 8, 9, 10 or more) universal base modified nucleotides, and optionally a terminal cap molecule at the 3′-end, the 5′-end, or both of the 3′- and 5′-ends of the antisense strand. In another embodiment, one or more, for example about 1, 2, 3, 4, 5, 6, 7, 8, 9, 10, or more, pyrimidine nucleotides of the sense and/or antisense siNA strand are chemically-modified with 2′-deoxy, 2′-O-methyl, 2′-O-trifluoromethyl, 2′-O-ethyl-trifluoromethoxy, 2′-O-difluoromethoxy-ethoxy, 4′-thio and/or 2′-deoxy-2′-fluoro nucleotides, with or without about 1 to about 5 or more, for example about 1, 2, 3, 4, 5, or more phosphorothioate internucleotide linkages and/or a terminal cap molecule at the 3′-end, the 5′-end, or both of the 3′- and 5′-ends, being present in the same or different strand.

[0113] In one embodiment, the invention features a siNA molecule, wherein the antisense strand comprises one or more, for example, about 1, 2, 3, 4, 5, 6, 7, 8, 9, 10, or more phosphorothioate internucleotide linkages, and/or about one or more (e.g., about 1, 2, 3, 4, 5, 6, 7, 8, 9, 10 or more) 2′-deoxy, 2′-O-methyl, 2′-deoxy-2′-fluoro, 2′-O-trifluoromethyl, 2′-O-ethyl-trifluoromethoxy, 2′-O-difluoromethoxy-ethoxy, 4′-thio and/or one or more (e.g., about 1, 2, 3, 4, 5, 6, 7, 8, 9, 10 or more) universal base modified nucleotides, and optionally a terminal cap molecule at the 3′-end, the 5′-end, or both of the 3′- and 5′-ends of the sense strand; and wherein the antisense strand comprises about 1 to about 10 or more, specifically about 1, 2, 3, 4, 5, 6, 7, 8, 9, 10 or more phosphorothioate internucleotide linkages, and/or one or more (e.g., about 1, 2, 3, 4, 5, 6, 7, 8, 9, 10 or more) 2′-deoxy, 2′-O-methyl, 2′-deoxy-2′-fluoro, 2′-O-trifluoromethyl, 2′-O-ethyl-trifluoromethoxy, 2′-O-difluoromethoxy-ethoxy, 4′-thio and/or one or more (e.g., about 1, 2, 3, 4, 5, 6, 7, 8, 9, 10 or more) universal base modified nucleotides, and optionally a terminal cap molecule at the 3′-end, the 5′-end, or both of the 3′- and 5′-ends of the antisense strand. In another embodiment, one or more, for example about 1, 2, 3, 4, 5, 6, 7, 8, 9, 10 or more pyrimidine nucleotides of the sense and/or antisense siNA strand are chemically-modified with 2′-deoxy, 2′-O-methyl, 2′-O-trifluoromethyl, 2′-O-ethyl-trifluoromethoxy, 2′-O-difluoromethoxy-ethoxy, 4′-thio and/or 2′-deoxy-2′-fluoro nucleotides, with or without one or more, for example, about 1, 2, 3, 4, 5, 6, 7, 8, 9, 10 or more phosphorothioate internucleotide linkages and/or a terminal cap molecule at the 3′-end, the 5′-end, or both of the 3′ and 5′-ends, being present in the same or different strand.

[0114] In another embodiment, the invention features a siNA molecule, wherein the antisense strand comprises about 1 to about 5 or more, specifically about 1, 2, 3, 4, 5 or more phosphorothioate internucleotide linkages, and/or one or more (e.g., about 1, 2, 3, 4, 5, 6, 7, 8, 9, 10 or more) 2′-deoxy, 2′-O-methyl, 2′-deoxy-2′-fluoro, 2′-O-trifluoromethyl, 2′-O-ethyl-trifluoromethoxy, 2′-O-difluoromethoxy-ethoxy, 4′-thio and/or one or more (e.g., about 1, 2, 3, 4, 5, 6, 7, 8, 9, 10 or more) universal base modified nucleotides, and optionally a terminal cap molecule at the 3′-end, the 5′-end, or both of the 3′- and 5′-ends of the sense strand; and wherein the antisense strand comprises about 1 to about 5 or more, specifically about 1, 2, 3, 4, 5 or more phosphorothioate internucleotide linkages, and/or one or more (e.g., about 1, 2, 3, 4, 5, 6, 7, 8, 9, 10 or more) 2′-deoxy, 2′-O-methyl, 2′-deoxy-2′-fluoro, 2′-O-trifluoromethyl, 2′-O-ethyl-trifluoromethoxy, 2′-O-difluoromethoxy-ethoxy, 4′-thio and/or one or more (e.g., about 1, 2, 3, 4, 5, 6, 7, 8, 9, 10 or more) universal base modified nucleotides, and optionally a terminal cap molecule at the 3′-end, the 5′-end, or both of the 3′- and 5′-ends of the antisense strand. In another embodiment, one or more, for example about 1, 2, 3, 4, 5, 6, 7, 8, 9, 10 or more pyrimidine nucleotides of the sense and/or antisense siNA strand are chemically-modified with 2′-deoxy, 2′-O-methyl, 2′-O-trifluoromethyl, 2′-O-ethyl-trifluoromethoxy, 2′-O-difluoromethoxy-ethoxy, 4′-thio and/or 2′-deoxy-2′-fluoro nucleotides, with or without about 1 to about 5, for example about 1, 2, 3, 4, 5 or more phosphorothioate internucleotide linkages and/or a terminal cap molecule at the 3′-end, the 5′-end, or both of the 3′- and 5′-ends, being present in the same or different strand.

[0115] In one embodiment, the invention features a chemically-modified short interfering nucleic acid (siNA) molecule having about 1 to about 5 or more (specifically about 1, 2, 3, 4, 5 or more) phosphorothioate internucleotide linkages in each strand of the siNA molecule.

[0116] In another embodiment, the invention features a siNA molecule comprising 2′-5′ internucleotide linkages. The 2′-5′ internucleotide linkage(s) can be at the 3′-end, the 5′-end, or both of the 3′- and 5′-ends of one or both siNA sequence strands. In addition, the 2′-5′ internucleotide linkage(s) can be present at various other positions within one or both siNA sequence strands, for example, about 1, 2, 3, 4, 5, 6, 7, 8, 9, 10, or more including every internucleotide linkage of a pyrimidine nucleotide in one or both strands of the siNA molecule can comprise a 2′-5′ internucleotide linkage, or about 1, 2, 3, 4, 5, 6, 7, 8, 9, 10, or more including every internucleotide linkage of a purine nucleotide in one or both strands of the siNA molecule can comprise a 2′-5′ internucleotide linkage.

[0117] In another embodiment, a chemically-modified siNA molecule of the invention comprises a duplex having two strands, one or both of which can be chemically-modified, wherein each strand is independently about 15 to about 30 (e.g., about 15, 16, 17, 18, 19, 20, 21, 22, 23, 24, 25, 26, 27, 28, 29, or 30) nucleotides in length, wherein the duplex has about 15 to about 30 (e.g., about 15, 16, 17, 18, 19, 20, 21, 22, 23, 24, 25, 26, 27, 28, 29, or 30) base pairs, and wherein the chemical modification comprises a structure having any of Formulae I-VII. For example, an exemplary chemically-modified siNA molecule of the invention comprises a duplex having two strands, one or both of which can be chemically-modified with a chemical modification having any of Formulae I-VII or any combination thereof, wherein each strand consists of about 21 nucleotides, each having a 2-nucleotide 3′-terminal nucleotide overhang, and wherein the duplex has about 19 base pairs. In another embodiment, a siNA molecule of the invention comprises a single stranded hairpin structure, wherein the siNA is about 36 to about 70 (e.g., about 36, 40, 45, 50, 55, 60, 65, or 70) nucleotides in length having about 15 to about 30 (e.g., about 15, 16, 17, 18, 19, 20, 21, 22, 23, 24, 25, 26, 27, 28, 29, or 30) base pairs, and wherein the siNA can include a chemical modification comprising a structure having any of Formulae I-VII or any combination thereof. For example, an exemplary chemically-modified siNA molecule of the invention comprises a linear oligonucleotide having about 42 to about 50 (e.g., about 42, 43, 44, 45, 46, 47, 48, 49, or 50) nucleotides that is chemically-modified with a chemical modification having any of Formulae I-VII or any combination thereof, wherein the linear oligonucleotide forms a hairpin structure having about 19 to about 21 (e.g., 19, 20, or 21) base pairs and a 2-nucleotide 3′-terminal nucleotide overhang. In another embodiment, a linear hairpin siNA molecule of the invention contains a stem loop motif, wherein the loop portion of the siNA molecule is biodegradable. For example, a linear hairpin siNA molecule of the invention is designed such that degradation of the loop portion of the siNA molecule in vivo can generate a double-stranded siNA molecule with 3′-terminal overhangs, such as 3′-terminal nucleotide overhangs comprising about 2 nucleotides.

[0118] In another embodiment, a siNA molecule of the invention comprises a hairpin structure, wherein the siNA is about 25 to about 50 (e.g., about 25, 26, 27, 28, 29, 30, 31, 32, 33, 34, 35, 36, 37, 38, 39, 40, 41, 42, 43, 44, 45, 46, 47, 48, 49, or 50) nucleotides in length having about 3 to about 25 (e.g., about 3, 4, 5, 6, 7, 8, 9, 10, 11, 12, 13, 14, 15, 16, 17, 18, 19, 20, 21, 22, 23, 24, or 25) base pairs, and wherein the siNA can include one or more chemical modifications comprising a structure having any of Formulae I-VII or any combination thereof. For example, an exemplary chemically-modified siNA molecule of the invention comprises a linear oligonucleotide having about 25 to about 35 (e.g., about 25, 26, 27, 28, 29, 30, 31, 32, 33, 34, or 35) nucleotides that is chemically-modified with one or more chemical modifications having any of Formulae I-VII or any combination thereof, wherein the linear oligonucleotide forms a hairpin structure having about 3 to about 25 (e.g., about 3, 4, 5, 6, 7, 8, 9, 10, 11, 12, 13, 14, 15, 16, 17, 18, 19, 20, 21, 22, 23, 24, or 25) base pairs and a 5′-terminal phosphate group that can be chemically modified as described herein (for example a 5′-terminal phosphate group having Formula IV). In another embodiment, a linear hairpin siNA molecule of the invention contains a stem loop motif, wherein the loop portion of the siNA molecule is biodegradable. In one embodiment, a linear hairpin siNA molecule of the invention comprises a loop portion comprising a non-nucleotide linker.

[0119] In another embodiment, a siNA molecule of the invention comprises an asymmetric hairpin structure, wherein the siNA is about 25 to about 50 (e.g., about 25, 26, 27, 28, 29, 30, 31, 32, 33, 34, 35, 36, 37, 38, 39, 40, 41, 42, 43, 44, 45, 46, 47, 48, 49, or 50) nucleotides in length having about 3 to about 25 (e.g., about 3, 4, 5, 6, 7, 8, 9, 10, 11, 12, 13, 14, 15, 16, 17, 18, 19, 20, 21, 22, 23, 24, or 25) base pairs, and wherein the siNA can include one or more chemical modifications comprising a structure having any of Formulae I-VII or any combination thereof. For example, an exemplary chemically-modified siNA molecule of the invention comprises a linear oligonucleotide having about 25 to about 35 (e.g., about 25, 26, 27, 28, 29, 30, 31, 32, 33, 34, or 35) nucleotides that is chemically-modified with one or more chemical modifications having any of Formulae I-VII or any combination thereof, wherein the linear oligonucleotide forms an asymmetric hairpin structure having about 3 to about 25 (e.g., about 3, 4, 5, 6, 7, 8, 9, 10, 11, 12, 13, 14, 15, 16, 17, 18, 19, 20, 21, 22, 23, 24, or 25) base pairs and a 5′-terminal phosphate group that can be chemically modified as described herein (for example a 5′-terminal phosphate group having Formula IV). In one embodiment, an asymmetric hairpin siNA molecule of the invention contains a stem loop motif, wherein the loop portion of the siNA molecule is biodegradable. In another embodiment, an asymmetric hairpin siNA molecule of the invention comprises a loop portion comprising a non-nucleotide linker.

[0120] In another embodiment, a siNA molecule of the invention comprises an asymmetric double stranded structure having separate polynucleotide strands comprising sense and antisense regions, wherein the antisense region is about 15 to about 30 (e.g., about 15, 16, 17, 18, 19, 20, 21, 22, 23, 24, 25, 26, 27, 28, 29, or 30) nucleotides in length, wherein the sense region is about 3 to about 25 (e.g., about 3, 4, 5, 6, 7, 8, 9, 10, 11, 12, 13, 14, 15, 16, 17, 18, 19, 20, 21, 22, 23, 24, or 25) nucleotides in length, wherein the sense region and the antisense region have at least 3 complementary nucleotides, and wherein the siNA can include one or more chemical modifications comprising a structure having any of Formulae I-VII or any combination thereof. For example, an exemplary chemically-modified siNA molecule of the invention comprises an asymmetric double stranded structure having separate polynucleotide strands comprising sense and antisense regions, wherein the antisense region is about 18 to about 23 (e.g., about 18, 19, 20, 21, 22, or 23) nucleotides in length and wherein the sense region is about 3 to about 15 (e.g., about 3, 4, 5, 6, 7, 8, 9, 10, 11, 12, 13, 14, or 15) nucleotides in length, wherein the sense region the antisense region have at least 3 complementary nucleotides, and wherein the siNA can include one or more chemical modifications comprising a structure having any of Formulae I-VII or any combination thereof. In another embodiment, the asymmetric double stranded siNA molecule can also have a 5′-terminal phosphate group that can be chemically modified as described herein (for example a 5′-terminal phosphate group having Formula IV).

[0121] In another embodiment, a siNA molecule of the invention comprises a circular nucleic acid molecule, wherein the siNA is about 38 to about 70 (e.g., about 38, 40, 45, 50, 55, 60, 65, or 70) nucleotides in length having about 15 to about 30 (e.g., about 15, 16, 17, 18, 19, 20, 21, 22, 23, 24, 25, 26, 27, 28, 29, or 30) base pairs, and wherein the siNA can include a chemical modification, which comprises a structure having any of Formulae I-VII or any combination thereof. For example, an exemplary chemically-modified siNA molecule of the invention comprises a circular oligonucleotide having about 42 to about 50 (e.g., about 42, 43, 44, 45, 46, 47, 48, 49, or 50) nucleotides that is chemically-modified with a chemical modification having any of Formulae I-VII or any combination thereof, wherein the circular oligonucleotide forms a dumbbell shaped structure having about 19 base pairs and 2 loops.

[0122] In another embodiment, a circular siNA molecule of the invention contains two loop motifs, wherein one or both loop portions of the siNA molecule is biodegradable. For example, a circular siNA molecule of the invention is designed such that degradation of the loop portions of the siNA molecule in vivo can generate a double-stranded siNA molecule with 3′-terminal overhangs, such as 3′-terminal nucleotide overhangs comprising about 2 nucleotides.

[0123] In one embodiment, a siNA molecule of the invention comprises at least one (e.g., about 1, 2, 3, 4, 5, 6, 7, 8, 9, 10, or more) abasic moiety, for example a compound having Formula V:

[chemical structure]

wherein each R3, R4, R5, R6, R7, R8, R10, R11, R12, and R13 is independently H, OH, alkyl, substituted alkyl, alkaryl or aralkyl, F, Cl, Br, CN, CF3, OCF3, OCH3, OCN, O-alkyl, S-alkyl, N-alkyl, O-alkenyl, S-alkenyl, N-alkenyl, SO-alkyl, alkyl-OSH, alkyl-OH, O-alkyl-OH, O-alkyl-SH, S-alkyl-OH, S-alkyl-SH, alkyl-5-alkyl, alkyl-O-alkyl, ONO2, NO2, N3, NH2, aminoalkyl, aminoacid, aminoacyl, ONH2, O-aminoalkyl, O-aminoacid, O-aminoacyl, heterocycloalkyl, heterocycloalkaryl, aminoalkylamino, polyalklylamino, substituted silyl, or a group having any of Formula I, II, III, IV, V, VI and/or VII, any of which can be included in the structure of the siNA molecule or serve as a point of attachment to the siNA molecule; R9 is O, S, CH2, S═O, CHF, or CF2. In one embodiment, R3 and/or R7 comprises a conjugate moiety and a linker (e.g., a nucleotide or non-nucleotide linker as described herein or otherwise known in the art). Non-limiting examples of conjugate moieties include ligands for cellular receptors, such as peptides derived from naturally occurring protein ligands; protein localization sequences, including cellular ZIP code sequences; antibodies; nucleic acid aptamers; vitamins and other co-factors, such as folate and N-acetylgalactosamine; polymers, such as polyethyleneglycol (PEG); phospholipids; cholesterol; steroids, and polyamines, such as PEI, spermine or spermidine.

[0124] In one embodiment, a siNA molecule of the invention comprises at least one (e.g., about 1, 2, 3, 4, 5, 6, 7, 8, 9, 10, or more) inverted abasic moiety, for example a compound having Formula VI:

[chemical structure]

wherein each R3, R4, R5, R6, R7, R8, R10, R11, R12, and R13 is independently H, OH, alkyl, substituted alkyl, alkaryl or aralkyl, F, Cl, Br, CN, CF3, OCF3, OCH3, OCN, O-alkyl, S-alkyl, N-alkyl, O-alkenyl, S-alkenyl, N-alkenyl, SO-alkyl, alkyl-OSH, alkyl-OH, O-alkyl-OH, O-alkyl-SH, S-alkyl-OH, S-alkyl-SH, alkyl-5-alkyl, alkyl-O-alkyl, ONO2, NO2, N3, NH2, aminoalkyl, aminoacid, aminoacyl, ONH2, O-aminoalkyl, O-aminoacid, O-aminoacyl, heterocycloalkyl, heterocycloalkaryl, aminoalkylamino, polyalklylamino, substituted silyl, or a group having any of Formula I, II, III, IV, V, VI and/or VII, any of which can be included in the structure of the siNA molecule or serve as a point of attachment to the siNA molecule; R9 is O, S, CH2, S═O, CHF, or CF2, and either R2, R3, R8 or R13 serve as points of attachment to the siNA molecule of the invention. In one embodiment, R3 and/or R7 comprises a conjugate moiety and a linker (e.g., a nucleotide or non-nucleotide linker as described herein or otherwise known in the art). Non-limiting examples of conjugate moieties include ligands for cellular receptors, such as peptides derived from naturally occurring protein ligands; protein localization sequences, including cellular ZIP code sequences; antibodies; nucleic acid aptamers; vitamins and other co-factors, such as folate and N-acetylgalactosamine; polymers, such as polyethyleneglycol (PEG); phospholipids; cholesterol; steroids, and polyamines, such as PEI, spermine or spermidine.

[0125] In another embodiment, a siNA molecule of the invention comprises at least one (e.g., about 1, 2, 3, 4, 5, 6, 7, 8, 9, 10, or more) substituted polyalkyl moieties, for example a compound having Formula VII:

[chemical structure]

wherein each n is independently an integer from 1 to 12, each R1, R2 and R3 is independently H, OH, alkyl, substituted alkyl, alkaryl or aralkyl, F, Cl, Br, CN, CF3, OCF3, OCH3, OCN, O-alkyl, S-alkyl, N-alkyl, O-alkenyl, S-alkenyl, N-alkenyl, SO-alkyl, alkyl-OSH, alkyl-OH, O-alkyl-OH, O-alkyl-SH, S-alkyl-OH, S-alkyl-SH, alkyl-5-alkyl, alkyl-O-alkyl, ONO2, NO2, N3, NH2, aminoalkyl, aminoacid, aminoacyl, ONH2, O-aminoalkyl, O-aminoacid, O-aminoacyl, heterocycloalkyl, heterocycloalkaryl, aminoalkylamino, polyalklylamino, substituted silyl, or a group having any of Formula I, II, III, IV, V, VI and/or VII, any of which can be included in the structure of the siNA molecule or serve as a point of attachment to the siNA molecule. In one embodiment, R3 and/or R1 comprises a conjugate moiety and a linker (e.g., a nucleotide or non-nucleotide linker as described herein or otherwise known in the art). Non-limiting examples of conjugate moieties include ligands for cellular receptors, such as peptides derived from naturally occurring protein ligands; protein localization sequences, including cellular ZIP code sequences; antibodies; nucleic acid aptamers; vitamins and other co-factors, such as folate and N-acetylgalactosamine; polymers, such as polyethyleneglycol (PEG); phospholipids; cholesterol; steroids, and polyamines, such as PEI, spermine or spermidine.

[0126] By “ZIP code” sequences is meant, any peptide or protein sequence that is involved in cellular topogenic signaling mediated transport (see for example Ray et al., 2004, Science, 306(1501): 1505).

[0127] Each nucleotide within the double stranded siNA molecule can independently have a chemical modification comprising the structure of any of Formulae I-VIII. Thus, in one embodiment, one or more nucleotide positions of a siNA molecule of the invention comprises a chemical modification having structure of any of Formulae I-VII or any other modification herein. In one embodiment, each nucleotide position of a siNA molecule of the invention comprises a chemical modification having structure of any of Formulae I-VII or any other modification herein.

[0128] In one embodiment, one or more nucleotide positions of one or both strands of a double stranded siNA molecule of the invention comprises a chemical modification having structure of any of Formulae I-VII or any other modification herein. In one embodiment, each nucleotide position of one or both strands of a double stranded siNA molecule of the invention comprises a chemical modification having structure of any of Formulae I-VII or any other modification herein.

[0129] In another embodiment, the invention features a compound having Formula VII, wherein R1 and R2 are hydroxyl (OH) groups, n=1, and R3 comprises 0 and is the point of attachment to the 3′-end, the 5′-end, or both of the 3′ and 5′-ends of one or both strands of a double-stranded siNA molecule of the invention or to a single-stranded siNA molecule of the invention. This modification is referred to herein as “glyceryl” (for example modification 6 in FIG. 10).

[0130] In another embodiment, a chemically modified nucleoside or non-nucleoside (e.g. a moiety having any of Formula V, VI or VII) of the invention is at the 3′-end, the 5′-end, or both of the 3′ and 5′-ends of a siNA molecule of the invention. For example, chemically modified nucleoside or non-nucleoside (e.g., a moiety having Formula V, VI or VII) can be present at the 3′-end, the 5′-end, or both of the 3′ and 5′-ends of the antisense strand, the sense strand, or both antisense and sense strands of the siNA molecule. In one embodiment, the chemically modified nucleoside or non-nucleoside (e.g., a moiety having Formula V, VI or VII) is present at the 5′-end and 3′-end of the sense strand and the 3′-end of the antisense strand of a double stranded siNA molecule of the invention. In one embodiment, the chemically modified nucleoside or non-nucleoside (e.g., a moiety having Formula V, VI or VII) is present at the terminal position of the 5′-end and 3′-end of the sense strand and the 3′-end of the antisense strand of a double stranded siNA molecule of the invention. In one embodiment, the chemically modified nucleoside or non-nucleoside (e.g., a moiety having Formula V, VI or VII) is present at the two terminal positions of the 5′-end and 3′-end of the sense strand and the 3′-end of the antisense strand of a double stranded siNA molecule of the invention. In one embodiment, the chemically modified nucleoside or non-nucleoside (e.g., a moiety having Formula V, VI or VII) is present at the penultimate position of the 5′-end and 3′-end of the sense strand and the 3′-end of the antisense strand of a double stranded siNA molecule of the invention. In addition, a moiety having Formula VII can be present at the 3′-end or the 5′-end of a hairpin siNA molecule as described herein.

[0131] In another embodiment, a siNA molecule of the invention comprises an abasic residue having Formula V or VI, wherein the abasic residue having Formula VI or VI is connected to the siNA construct in a 3′-3′, 3′-2′, 2′-3′, or 5′-5′ configuration, such as at the 3′-end, the 5′-end, or both of the 3′ and 5′-ends of one or both siNA strands.

[0132] In one embodiment, a siNA molecule of the invention comprises one or more (e.g., about 1, 2, 3, 4, 5, 6, 7, 8, 9, 10, or more) locked nucleic acid (LNA) nucleotides, for example, at the 5′-end, the 3′-end, both of the 5′ and 3′-ends, or any combination thereof, of the siNA molecule.

[0133] In one embodiment, a siNA molecule of the invention comprises one or more (e.g., about 1, 2, 3, 4, 5, 6, 7, 8, 9, 10, or more) 4′-thio nucleotides, for example, at the 5′-end, the 3′-end, both of the 5′ and 3′-ends, or any combination thereof, of the siNA molecule.

[0134] In another embodiment, a siNA molecule of the invention comprises one or more (e.g., about 1, 2, 3, 4, 5, 6, 7, 8, 9, 10, or more) acyclic nucleotides, for example, at the 5′-end, the 3′-end, both of the 5′ and 3′-ends, or any combination thereof, of the siNA molecule.

[0135] In one embodiment, a chemically-modified short interfering nucleic acid (siNA) molecule of the invention comprises a sense strand or sense region having one or more (e.g., 1, 2, 3, 4, 5, 6, 7, 8, 9, 10, 11, 12, 13, 14 15, 16, 17, 18, 19, 20, 21, 22, 23, 24, 25, 26, 27, 28, 29, 30 or more) 2′-O-alkyl (e.g. 2′-O-methyl), 2′-deoxy-2′-fluoro, 2′-deoxy, FANA, or abasic chemical modifications or any combination thereof.

[0136] In one embodiment, a chemically-modified short interfering nucleic acid (siNA) molecule of the invention comprises an antisense strand or antisense region having one or more (e.g., 1, 2, 3, 4, 5, 6, 7, 8, 9, 10, 11, 12, 13, 14, 15, 16, 17, 18, 19, 20, 21, 22, 23, 24, 25, 26, 27, 28, 29, 30 or more) 2′-O-alkyl (e.g. 2′-O-methyl), 2′-deoxy-2′-fluoro, 2′-deoxy, FANA, or abasic chemical modifications or any combination thereof.

[0137] In one embodiment, a chemically-modified short interfering nucleic acid (siNA) molecule of the invention comprises a sense strand or sense region and an antisense strand or antisense region, each having one or more (e.g., 1, 2, 3, 4, 5, 6, 7, 8, 9, 10, 11, 12, 13, 14, 15, 16, 17, 18, 19, 20, 21, 22, 23, 24, 25, 26, 27, 28, 29, 30 or more) 2′-O-alkyl (e.g. 2′-O-methyl), 2′-deoxy-2′-fluoro, 2′-deoxy, FANA, or abasic chemical modifications or any combination thereof.

[0138] In one embodiment, the invention features a chemically-modified short interfering nucleic acid (siNA) molecule of the invention comprising a sense region, wherein any (e.g., one or more or all) pyrimidine nucleotides present in the sense region are 2′-deoxy-2′-fluoro pyrimidine nucleotides (e.g., wherein all pyrimidine nucleotides are 2′-deoxy-2′-fluoro pyrimidine nucleotides or alternately a plurality (ie. more than one) of pyrimidine nucleotides are 2′-deoxy-2′-fluoro pyrimidine nucleotides).

[0139] In one embodiment, the invention features a chemically-modified short interfering nucleic acid (siNA) molecule of the invention comprising a sense region, wherein any (e.g., one or more or all) pyrimidine nucleotides present in the sense region are FANA pyrimidine nucleotides (e.g., wherein all pyrimidine nucleotides are FANA pyrimidine nucleotides or alternately a plurality (ie. more than one) of pyrimidine nucleotides are FANA pyrimidine nucleotides).

[0140] In one embodiment, the invention features a chemically-modified short interfering nucleic acid (siNA) molecule of the invention comprising an antisense region, wherein any (e.g., one or more or all) pyrimidine nucleotides present in the antisense region are 2′-deoxy-2′-fluoro pyrimidine nucleotides (e.g., wherein all pyrimidine nucleotides are 2′-deoxy-2′-fluoro pyrimidine nucleotides or alternately a plurality (ie. more than one) of pyrimidine nucleotides are 2′-deoxy-2′-fluoro pyrimidine nucleotides).

[0141] In one embodiment, the invention features a chemically-modified short interfering nucleic acid (siNA) molecule of the invention comprising a sense region and an antisense region, wherein any (e.g., one or more or all) pyrimidine nucleotides present in the sense region and the antisense region are 2′-deoxy-2′-fluoro pyrimidine nucleotides (e.g., wherein all pyrimidine nucleotides are 2′-deoxy-2′-fluoro pyrimidine nucleotides or alternately a plurality (ie. more than one) of pyrimidine nucleotides are 2′-deoxy-2′-fluoro pyrimidine nucleotides).

[0142] In one embodiment, the invention features a chemically-modified short interfering nucleic acid (siNA) molecule of the invention comprising a sense region, wherein any (e.g., one or more or all) purine nucleotides present in the sense region are 2′-deoxy purine nucleotides (e.g., wherein all purine nucleotides are 2′-deoxy purine nucleotides or alternately a plurality (ie. more than one) of purine nucleotides are 2′-deoxy purine nucleotides).

[0143] In one embodiment, the invention features a chemically-modified short interfering nucleic acid (siNA) molecule of the invention comprising an antisense region, wherein any (e.g., one or more or all) purine nucleotides present in the antisense region are 2′-O-methyl purine nucleotides (e.g., wherein all purine nucleotides are 2′-O-methyl purine nucleotides or alternately a plurality (ie. more than one) of pyrimidine nucleotides are 2′-O-methyl purine nucleotides).

[0144] In one embodiment, the invention features a chemically-modified short interfering nucleic acid (siNA) molecule of the invention comprising a sense region, wherein any (e.g., one or more or all) pyrimidine nucleotides present in the sense region are 2′-deoxy-2′-fluoro pyrimidine nucleotides (e.g., wherein all pyrimidine nucleotides are 2′-deoxy-2′-fluoro pyrimidine nucleotides or alternately a plurality (ie. more than one) of pyrimidine nucleotides are 2′-deoxy-2′-fluoro pyrimidine nucleotides), and wherein any (e.g., one or more or all) purine nucleotides present in the sense region are 2′-deoxy purine nucleotides (e.g., wherein all purine nucleotides are 2′-deoxy purine nucleotides or alternately a plurality (ie. more than one) of purine nucleotides are 2′-deoxy purine nucleotides).

[0145] In one embodiment, the invention features a chemically-modified short interfering nucleic acid (siNA) molecule of the invention comprising a sense region, wherein any (e.g., one or more or all) pyrimidine nucleotides present in the sense region are 2′-deoxy-2′-fluoro, 4′-thio, 2′-O-trifluoromethyl, 2′-O-ethyl-trifluoromethoxy, or 2′-O-difluoromethoxy-ethoxy pyrimidine nucleotides (e.g., wherein all pyrimidine nucleotides are 2′-deoxy-2′-fluoro, 4′-thio, 2′-O-trifluoromethyl, 2′-O-ethyl-trifluoromethoxy, or 2′-O-difluoromethoxy-ethoxy pyrimidine nucleotides or alternately a plurality (ie. more than one) of pyrimidine nucleotides are 2′-deoxy-2′-fluoro, 4′-thio, 2′-O-trifluoromethyl, 2′-O-ethyl-trifluoromethoxy, or 2′-O-difluoromethoxy-ethoxy pyrimidine nucleotides), and wherein any (e.g., one or more or all) purine nucleotides present in the sense region are 2′-deoxy purine nucleotides (e.g., wherein all purine nucleotides are 2′-deoxy purine nucleotides or alternately a plurality (ie. more than one) of purine nucleotides are 2′-deoxy purine nucleotides), wherein any nucleotides comprising a 3′-terminal nucleotide overhang that are present in said sense region are 2′-deoxy nucleotides.

[0146] In one embodiment, the invention features a chemically-modified short interfering nucleic acid (siNA) molecule of the invention comprising a sense region, wherein any (e.g., one or more or all) pyrimidine nucleotides present in the sense region are 2′-deoxy-2′-fluoro, 4′-thio, 2′-O-trifluoromethyl, 2′-O-ethyl-trifluoromethoxy, or 2′-O-difluoromethoxy-ethoxy pyrimidine nucleotides (e.g., wherein all pyrimidine nucleotides are 2′-deoxy-2′-fluoro, 4′-thio, 2′-O-trifluoromethyl, 2′-O-ethyl-trifluoromethoxy, or 2′-O-difluoromethoxy-ethoxy pyrimidine nucleotides or alternately a plurality (ie. more than one) of pyrimidine nucleotides are 2′-deoxy-2′-fluoro, 4′-thio, 2′-O-trifluoromethyl, 2′-O-ethyl-trifluoromethoxy, or 2′-O-difluoromethoxy-ethoxy pyrimidine nucleotides), and wherein any (e.g., one or more or all) purine nucleotides present in the sense region are 2′-O-methyl purine nucleotides (e.g., wherein all purine nucleotides are 2′-O-methyl, 4′-thio, 2′-O-trifluoromethyl, 2′-O-ethyl-trifluoromethoxy, or 2′-O-difluoromethoxy-ethoxy purine nucleotides or alternately a plurality (ie. more than one) of purine nucleotides are 2′-O-methyl, 4′-thio, 2′-O-trifluoromethyl, 2′-O-ethyl-trifluoromethoxy, or 2′-O-difluoromethoxy-ethoxy purine nucleotides).

[0147] In one embodiment, the invention features a chemically-modified short interfering nucleic acid (siNA) molecule of the invention comprising a sense region, wherein any (e.g., one or more or all) pyrimidine nucleotides present in the sense region are 2′-deoxy-2′-fluoro, 4′-thio, 2′-O-trifluoromethyl, 2′-O-ethyl-trifluoromethoxy, or 2′-O-difluoromethoxy-ethoxy pyrimidine nucleotides (e.g., wherein all pyrimidine nucleotides are 2′-deoxy-2′-fluoro, 4′-thio, 2′-O-trifluoromethyl, 2′-O-ethyl-trifluoromethoxy, or 2′-O-difluoromethoxy-ethoxy pyrimidine nucleotides or alternately a plurality (ie. more than one) of pyrimidine nucleotides are 2′-deoxy-2′-fluoro, 4′-thio, 2′-O-trifluoromethyl, 2′-O-ethyl-trifluoromethoxy, or 2′-O-difluoromethoxy-ethoxy pyrimidine nucleotides), wherein any (e.g., one or more or all) purine nucleotides present in the sense region are 2′-O-methyl, 4′-thio, 2′-O-trifluoromethyl, 2′-O-ethyl-trifluoromethoxy, or 2′-O-difluoromethoxy-ethoxy purine nucleotides (e.g., wherein all purine nucleotides are 2′-O-methyl, 4′-thio, 2′-O-trifluoromethyl, 2′-O-ethyl-trifluoromethoxy, or 2′-O-difluoromethoxy-ethoxy purine nucleotides or alternately a plurality (ie. more than one) of purine nucleotides are 2′-O-methyl, 4′-thio, 2′-O-trifluoromethyl, 2′-O-ethyl-trifluoromethoxy, or 2′-O-difluoromethoxy-ethoxy purine nucleotides), and wherein any nucleotides comprising a 3′-terminal nucleotide overhang that are present in said sense region are 2′-deoxy nucleotides.

[0148] In one embodiment, the invention features a chemically-modified short interfering nucleic acid (siNA) molecule of the invention comprising an antisense region, wherein any (e.g., one or more or all) pyrimidine nucleotides present in the antisense region are 2′-deoxy-2′-fluoro, 4′-thio, 2′-O-trifluoromethyl, 2′-O-ethyl-trifluoromethoxy, or 2′-O-difluoromethoxy-ethoxy pyrimidine nucleotides (e.g., wherein all pyrimidine nucleotides are 2′-deoxy-2′-fluoro, 4′-thio, 2′-O-trifluoromethyl, 2′-O-ethyl-trifluoromethoxy, or 2′-O-difluoromethoxy-ethoxy pyrimidine nucleotides or alternately a plurality (ie. more than one) of pyrimidine nucleotides are 2′-deoxy-2′-fluoro, 4′-thio, 2′-O-trifluoromethyl, 2′-O-ethyl-trifluoromethoxy, or 2′-O-difluoromethoxy-ethoxy pyrimidine nucleotides), and wherein any (e.g., one or more or all) purine nucleotides present in the antisense region are 2′-O-methyl, 4′-thio, 2′-O-trifluoromethyl, 2′-O-ethyl-trifluoromethoxy, or 2′-O-difluoromethoxy-ethoxy purine nucleotides (e.g., wherein all purine nucleotides are 2′-O-methyl, 4′-thio, 2′-O-trifluoromethyl, 2′-O-ethyl-trifluoromethoxy, or 2′-O-difluoromethoxy-ethoxy purine nucleotides or alternately a plurality (ie. more than one) of purine nucleotides are 2′-O-methyl, 4′-thio, 2′-O-trifluoromethyl, 2′-O-ethyl-trifluoromethoxy, or 2′-O-difluoromethoxy-ethoxy purine nucleotides).

[0149] In one embodiment, the invention features a chemically-modified short interfering nucleic acid (siNA) molecule of the invention comprising an antisense region, wherein any (e.g., one or more or all) pyrimidine nucleotides present in the antisense region are 2′-deoxy-2′-fluoro, 4′-thio, 2′-O-trifluoromethyl, 2′-O-ethyl-trifluoromethoxy, or 2′-O-difluoromethoxy-ethoxy pyrimidine nucleotides (e.g., wherein all pyrimidine nucleotides are 2′-deoxy-2′-fluoro, 4′-thio, 2′-O-trifluoromethyl, 2′-O-ethyl-trifluoromethoxy, or 2′-O-difluoromethoxy-ethoxy pyrimidine nucleotides or alternately a plurality (ie. more than one) of pyrimidine nucleotides are 2′-deoxy-2′-fluoro, 4′-thio, 2′-O-trifluoromethyl, 2′-O-ethyl-trifluoromethoxy, or 2′-O-difluoromethoxy-ethoxy pyrimidine nucleotides), wherein any (e.g., one or more or all) purine nucleotides present in the antisense region are 2′-O-methyl, 4′-thio, 2′-O-trifluoromethyl, 2′-O-ethyl-trifluoromethoxy, or 2′-O-difluoromethoxy-ethoxy purine nucleotides (e.g., wherein all purine nucleotides are 2′-O-methyl, 4′-thio, 2′-O-trifluoromethyl, 2′-O-ethyl-trifluoromethoxy, or 2′-O-difluoromethoxy-ethoxy purine nucleotides or alternately a plurality (ie. more than one) of purine nucleotides are 2′-O-methyl, 4′-thio, 2′-O-trifluoromethyl, 2′-O-ethyl-trifluoromethoxy, or 2′-O-difluoromethoxy-ethoxy purine nucleotides), and wherein any nucleotides comprising a 3′-terminal nucleotide overhang that are present in said antisense region are 2′-deoxy nucleotides.

[0150] In one embodiment, the invention features a chemically-modified short interfering nucleic acid (siNA) molecule of the invention comprising an antisense region, wherein any (e.g., one or more or all) pyrimidine nucleotides present in the antisense region are 2′-deoxy-2′-fluoro, 4′-thio, 2′-O-trifluoromethyl, 2′-O-ethyl-trifluoromethoxy, or 2′-O-difluoromethoxy-ethoxy pyrimidine nucleotides (e.g., wherein all pyrimidine nucleotides are 2′-deoxy-2′-fluoro, 4′-thio, 2′-O-trifluoromethyl, 2′-O-ethyl-trifluoromethoxy, or 2′-O-difluoromethoxy-ethoxy pyrimidine nucleotides or alternately a plurality (ie. more than one) of pyrimidine nucleotides are 2′-deoxy-2′-fluoro, 4′-thio, 2′-O-trifluoromethyl, 2′-O-ethyl-trifluoromethoxy, or 2′-O-difluoromethoxy-ethoxy pyrimidine nucleotides), and wherein any (e.g., one or more or all) purine nucleotides present in the antisense region are 2′-deoxy purine nucleotides (e.g., wherein all purine nucleotides are 2′-deoxy purine nucleotides or alternately a plurality (ie. more than one) of purine nucleotides are 2′-deoxy purine nucleotides).

[0151] In one embodiment, the invention features a chemically-modified short interfering nucleic acid (siNA) molecule of the invention comprising an antisense region, wherein any (e.g., one or more or all) pyrimidine nucleotides present in the antisense region are 2′-deoxy-2′-fluoro, 4′-thio, 2′-O-trifluoromethyl, 2′-O-ethyl-trifluoromethoxy, or 2′-O-difluoromethoxy-ethoxy pyrimidine nucleotides (e.g., wherein all pyrimidine nucleotides are 2′-deoxy-2′-fluoro, 4′-thio, 2′-O-trifluoromethyl, 2′-O-ethyl-trifluoromethoxy, or 2′-O-difluoromethoxy-ethoxy pyrimidine nucleotides or alternately a plurality (ie. more than one) of pyrimidine nucleotides are 2′-deoxy-2′-fluoro, 4′-thio, 2′-O-trifluoromethyl, 2′-O-ethyl-trifluoromethoxy, or 2′-O-difluoromethoxy-ethoxy pyrimidine nucleotides), and wherein any (e.g., one or more or all) purine nucleotides present in the antisense region are 2′-O-methyl, 4′-thio, 2′-O-trifluoromethyl, 2′-O-ethyl-trifluoromethoxy, or 2′-O-difluoromethoxy-ethoxy purine nucleotides (e.g., wherein all purine nucleotides are 2′-O-methyl, 4′-thio, 2′-O-trifluoromethyl, 2′-O-ethyl-trifluoromethoxy, or 2′-O-difluoromethoxy-ethoxy purine nucleotides or alternately a plurality (ie. more than one) of purine nucleotides are 2′-O-methyl, 4′-thio, 2′-O-trifluoromethyl, 2′-O-ethyl-trifluoromethoxy, or 2′-O-difluoromethoxy-ethoxy purine nucleotides).

[0152] In one embodiment, the invention features a chemically-modified short interfering nucleic acid (siNA) molecule of the invention capable of mediating RNA interference (RNAi) inside a cell or reconstituted in vitro system comprising a sense region, wherein one or more pyrimidine nucleotides present in the sense region are 2′-deoxy-2′-fluoro, 4′-thio, 2′-O-trifluoromethyl, 2′-O-ethyl-trifluoromethoxy, or 2′-O-difluoromethoxy-ethoxy pyrimidine nucleotides (e.g., wherein all pyrimidine nucleotides are 2′-deoxy-2′-fluoro, 4′-thio, 2′-O-trifluoromethyl, 2′-O-ethyl-trifluoromethoxy, or 2′-O-difluoromethoxy-ethoxy pyrimidine nucleotides or alternately a plurality (ie. more than one) of pyrimidine nucleotides are 2′-deoxy-2′-fluoro, 4′-thio, 2′-O-trifluoromethyl, 2′-O-ethyl-trifluoromethoxy, or 2′-O-difluoromethoxy-ethoxy pyrimidine nucleotides), and one or more purine nucleotides present in the sense region are 2′-deoxy purine nucleotides (e.g., wherein all purine nucleotides are 2′-deoxy purine nucleotides or alternately a plurality (ie. more than one) of purine nucleotides are 2′-deoxy purine nucleotides), and an antisense region, wherein one or more pyrimidine nucleotides present in the antisense region are 2′-deoxy-2′-fluoro, 4′-thio, 2′-O-trifluoromethyl, 2′-O-ethyl-trifluoromethoxy, or 2′-O-difluoromethoxy-ethoxy pyrimidine nucleotides (e.g., wherein all pyrimidine nucleotides are 2′-deoxy-2′-fluoro, 4′-thio, 2′-O-trifluoromethyl, 2′-O-ethyl-trifluoromethoxy, or 2′-O-difluoromethoxy-ethoxy pyrimidine nucleotides or alternately a plurality (ie. more than one) of pyrimidine nucleotides are 2′-deoxy-2′-fluoro, 4′-thio, 2′-O-trifluoromethyl, 2′-O-ethyl-trifluoromethoxy, or 2′-O-difluoromethoxy-ethoxy pyrimidine nucleotides), and one or more purine nucleotides present in the antisense region are 2′-O-methyl, 4′-thio, 2′-O-trifluoromethyl, 2′-O-ethyl-trifluoromethoxy, or 2′-O-difluoromethoxy-ethoxy purine nucleotides (e.g., wherein all purine nucleotides are 2′-O-methyl, 4′-thio, 2′-O-trifluoromethyl, 2′-O-ethyl-trifluoromethoxy, or 2′-O-difluoromethoxy-ethoxy purine nucleotides or alternately a plurality (ie. more than one) of purine nucleotides are 2′-O-methyl, 4′-thio, 2′-O-trifluoromethyl, 2′-O-ethyl-trifluoromethoxy, or 2′-O-difluoromethoxy-ethoxy purine nucleotides). The sense region and/or the antisense region can have a terminal cap modification, such as any modification described herein or shown in FIG. 10, that is optionally present at the 3′-end, the 5′-end, or both of the 3′ and 5′-ends of the sense and/or antisense sequence. The sense and/or antisense region can optionally further comprise a 3′-terminal nucleotide overhang having about 1 to about 4 (e.g., about 1, 2, 3, or 4) 2′-deoxynucleotides. The overhang nucleotides can further comprise one or more (e.g., about 1, 2, 3, 4 or more) phosphorothioate, phosphonoacetate, and/or thiophosphonoacetate internucleotide linkages. Non-limiting examples of these chemically-modified siNAs are shown in FIGS. 4 and 5 and Table III herein. In any of these described embodiments, the purine nucleotides present in the sense region are alternatively 2′-O-methyl, 4′-thio, 2′-O-trifluoromethyl, 2′-O-ethyl-trifluoromethoxy, or 2′-O-difluoromethoxy-ethoxy purine nucleotides (e.g., wherein all purine nucleotides are 2′-O-methyl, 4′-thio, 2′-O-trifluoromethyl, 2′-O-ethyl-trifluoromethoxy, or 2′-O-difluoromethoxy-ethoxy purine nucleotides or alternately a plurality of purine nucleotides are 2′-O-methyl, 4′-thio, 2′-O-trifluoromethyl, 2′-O-ethyl-trifluoromethoxy, or 2′-O-difluoromethoxy-ethoxy purine nucleotides) and one or more purine nucleotides present in the antisense region are 2′-O-methyl, 4′-thio, 2′-O-trifluoromethyl, 2′-O-ethyl-trifluoromethoxy, or 2′-O-difluoromethoxy-ethoxy purine nucleotides (e.g., wherein all purine nucleotides are 2′-O-methyl, 4′-thio, 2′-O-trifluoromethyl, 2′-O-ethyl-trifluoromethoxy, or 2′-O-difluoromethoxy-ethoxy purine nucleotides or alternately a plurality (ie. more than one) of purine nucleotides are 2′-O-methyl, 4′-thio, 2′-O-trifluoromethyl, 2′-O-ethyl-trifluoromethoxy, or 2′-O-difluoromethoxy-ethoxy purine nucleotides). Also, in any of these embodiments, one or more purine nucleotides present in the sense region are alternatively purine ribonucleotides (e.g., wherein all purine nucleotides are purine ribonucleotides or alternately a plurality (ie. more than one) of purine nucleotides are purine ribonucleotides) and any purine nucleotides present in the antisense region are 2′-O-methyl, 4′-thio, 2′-O-trifluoromethyl, 2′-O-ethyl-trifluoromethoxy, or 2′-O-difluoromethoxy-ethoxy purine nucleotides (e.g., wherein all purine nucleotides are 2′-O-methyl, 4′-thio, 2′-O-trifluoromethyl, 2′-O-ethyl-trifluoromethoxy, or 2′-O-difluoromethoxy-ethoxy purine nucleotides or alternately a plurality (ie. more than one) of purine nucleotides are 2′-O-methyl, 4′-thio, 2′-O-trifluoromethyl, 2′-O-ethyl-trifluoromethoxy, or 2′-O-difluoromethoxy-ethoxy purine nucleotides). Additionally, in any of these embodiments, one or more purine nucleotides present in the sense region and/or present in the antisense region are alternatively selected from the group consisting of 2′-deoxy nucleotides, locked nucleic acid (LNA) nucleotides, 2′-methoxyethyl nucleotides, 4′-thionucleotides, 2′-O-trifluoromethyl nucleotides, 2′-O-ethyl-trifluoromethoxy nucleotides, 2′-O-difluoromethoxy-ethoxy nucleotides and 2′-O-methyl nucleotides (e.g., wherein all purine nucleotides are selected from the group consisting of 2′-deoxy nucleotides, locked nucleic acid (LNA) nucleotides, 2′-methoxyethyl nucleotides, 4′-thionucleotides, 2′-O-trifluoromethyl nucleotides, 2′-O-ethyl-trifluoromethoxy nucleotides, 2′-O-difluoromethoxy-ethoxy nucleotides and 2′-O-methyl nucleotides or alternately a plurality (ie. more than one) of purine nucleotides are selected from the group consisting of 2′-deoxy nucleotides, locked nucleic acid (LNA) nucleotides, 2′-methoxyethyl nucleotides, 4′-thionucleotides, 2′-O-trifluoromethyl nucleotides, 2′-O-ethyl-trifluoromethoxy nucleotides, 2′-O-difluoromethoxy-ethoxy nucleotides and 2′-O-methyl nucleotides).

[0153] In another embodiment, any modified nucleotides present in the siNA molecules of the invention, preferably in the antisense strand of the siNA molecules of the invention, but also optionally in the sense and/or both antisense and sense strands, comprise modified nucleotides having properties or characteristics similar to naturally occurring ribonucleotides. For example, the invention features siNA molecules including modified nucleotides having a Northern conformation (e.g., Northern pseudorotation cycle, see for example Saenger, Principles of Nucleic Acid Structure, Springer-Verlag ed., 1984) otherwise known as a “ribo-like” or “A-form helix” configuration. As such, chemically modified nucleotides present in the siNA molecules of the invention, preferably in the antisense strand of the siNA molecules of the invention, but also optionally in the sense and/or both antisense and sense strands, are resistant to nuclease degradation while at the same time maintaining the capacity to mediate RNAi. Non-limiting examples of nucleotides having a northern configuration include locked nucleic acid (LNA) nucleotides (e.g., 2′-O, 4′-C-methylene-(D-ribofuranosyl) nucleotides); 2′-methoxyethoxy (MOE) nucleotides; 2′-methyl-thio-ethyl, 2′-deoxy-2′-fluoro nucleotides, 2′-deoxy-2′-chloro nucleotides, 2′-azido nucleotides, 2′-O-trifluoromethyl nucleotides, 2′-O-ethyl-trifluoromethoxy nucleotides, 2′-O-difluoromethoxy-ethoxy nucleotides, 4′-thio nucleotides and 2′-O-methyl nucleotides.

[0154] In one embodiment, the sense strand of a double stranded siNA molecule of the invention comprises a terminal cap moiety, (see for example FIG. 10) such as an inverted deoxyabasic moiety, at the 3′-end, 5′-end, or both 3′ and 5′-ends of the sense strand.

[0155] In one embodiment, the invention features a chemically-modified short interfering nucleic acid molecule (siNA) capable of mediating RNA interference (RNAi) inside a cell or reconstituted in vitro system, wherein the chemical modification comprises a conjugate covalently attached to the chemically-modified siNA molecule. Non-limiting examples of conjugates contemplated by the invention include conjugates and ligands described in Vargeese et al., U.S. Ser. No. 10/427,160, filed Apr. 30, 2003, incorporated by reference herein in its entirety, including the drawings. In another embodiment, the conjugate is covalently attached to the chemically-modified siNA molecule via a biodegradable linker. In one embodiment, the conjugate molecule is attached at the 3′-end of either the sense strand, the antisense strand, or both strands of the chemically-modified siNA molecule. In another embodiment, the conjugate molecule is attached at the 5′-end of either the sense strand, the antisense strand, or both strands of the chemically-modified siNA molecule. In yet another embodiment, the conjugate molecule is attached both the 3′-end and 5′-end of either the sense strand, the antisense strand, or both strands of the chemically-modified siNA molecule, or any combination thereof. In one embodiment, a conjugate molecule of the invention comprises a molecule that facilitates delivery of a chemically-modified siNA molecule into a biological system, such as a cell. In another embodiment, the conjugate molecule attached to the chemically-modified siNA molecule is a ligand for a cellular receptor, such as peptides derived from naturally occurring protein ligands; protein localization sequences, including cellular ZIP code sequences; antibodies; nucleic acid aptamers; vitamins and other co-factors, such as folate and N-acetylgalactosamine; polymers, such as polyethyleneglycol (PEG); phospholipids; cholesterol; steroids, and polyamines, such as PEI, spermine or spermidine. Examples of specific conjugate molecules contemplated by the instant invention that can be attached to chemically-modified siNA molecules are described in Vargeese et al., U.S. Ser. No. 10/201,394, filed Jul. 22, 2002 incorporated by reference herein. The type of conjugates used and the extent of conjugation of siNA molecules of the invention can be evaluated for improved pharmacokinetic profiles, bioavailability, and/or stability of siNA constructs while at the same time maintaining the ability of the siNA to mediate RNAi activity. As such, one skilled in the art can screen siNA constructs that are modified with various conjugates to determine whether the siNA conjugate complex possesses improved properties while maintaining the ability to mediate RNAi, for example in animal models as are generally known in the art.

[0156] In one embodiment, the invention features a short interfering nucleic acid (siNA) molecule of the invention, wherein the siNA further comprises a nucleotide, non-nucleotide, or mixed nucleotide/non-nucleotide linker that joins the sense region of the siNA to the antisense region of the siNA. In one embodiment, a nucleotide, non-nucleotide, or mixed nucleotide/non-nucleotide linker is used, for example, to attach a conjugate moiety to the siNA. In one embodiment, a nucleotide linker of the invention can be a linker of ≧2 nucleotides in length, for example about 3, 4, 5, 6, 7, 8, 9, or 10 nucleotides in length. In another embodiment, the nucleotide linker can be a nucleic acid aptamer. By “aptamer” or “nucleic acid aptamer” as used herein is meant a nucleic acid molecule that binds specifically to a target molecule wherein the nucleic acid molecule has sequence that comprises a sequence recognized by the target molecule in its natural setting. Alternately, an aptamer can be a nucleic acid molecule that binds to a target molecule where the target molecule does not naturally bind to a nucleic acid. The target molecule can be any molecule of interest. For example, the aptamer can be used to bind to a ligand-binding domain of a protein, thereby preventing interaction of the naturally occurring ligand with the protein. This is a non-limiting example and those in the art will recognize that other embodiments can be readily generated using techniques generally known in the art. (See, for example, Gold et al., 1995, Annu. Rev. Biochem., 64, 763; Brody and Gold, 2000, J. Biotechnol., 74, 5; Sun, 2000, Curr. Opin. Mol. Ther., 2, 100; Kusser, 2000, J. Biotechnol., 74, 27; Hermann and Patel, 2000, Science, 287, 820; and Jayasena, 1999, Clinical Chemistry, 45, 1628.)

[0157] In yet another embodiment, a non-nucleotide linker of the invention comprises abasic nucleotide, polyether, polyamine, polyamide, peptide, carbohydrate, lipid, polyhydrocarbon, or other polymeric compounds (e.g. polyethylene glycols such as those having between 2 and 100 ethylene glycol units). Specific examples include those described by Seela and Kaiser, Nucleic Acids Res. 1990, 18:6353 and Nucleic Acids Res. 1987, 15:3113; Cload and Schepartz, J. Am. Chem. Soc. 1991, 113:6324; Richardson and Schepartz, J. Am. Chem. Soc. 1991, 113:5109; Ma et al., Nucleic Acids Res. 1993, 21:2585 and Biochemistry 1993, 32:1751; Durand et al., Nucleic Acids Res. 1990, 18:6353; McCurdy et al., Nucleosides & Nucleotides 1991, 10:287; Jschke et al., Tetrahedron Lett. 1993, 34:301; Ono et al., Biochemistry 1991, 30:9914; Arnold et al., International Publication No. WO 89/02439; Usman et al., International Publication No. WO 95/06731; Dudycz et al., International Publication No. WO 95/11910 and Ferentz and Verdine, J. Am. Chem. Soc. 1991, 113:4000, all hereby incorporated by reference herein. A “non-nucleotide” further means any group or compound that can be incorporated into a nucleic acid chain in the place of one or more nucleotide units, including either sugar and/or phosphate substitutions, and allows the siNA molecule to retain RNAi activity or RNAi inhibitory to retain its inhibition activity. The group or compound can be abasic in that it does not contain a commonly recognized nucleotide base, such as adenosine, guanine, cytosine, uracil or thymine, for example at the C1 position of the sugar.

[0158] In one embodiment, the invention features a short interfering nucleic acid (siNA) molecule capable of mediating RNA interference (RNAi) inside a cell or reconstituted in vitro system, wherein one or both strands of the siNA molecule that are assembled from two separate oligonucleotides do not comprise any ribonucleotides (e.g., one or both strands of the siNA molecule are 100% chemically modified). For example, a siNA molecule can be assembled from a single oligonucleotide where the sense and antisense regions of the siNA comprise separate oligonucleotides that do not have any ribonucleotides (e.g., nucleotides having a 2′-OH group) present in the oligonucleotides. In another example, a siNA molecule can be assembled from a single oligonucleotide where the sense and antisense regions of the siNA are linked or circularized by a nucleotide or non-nucleotide linker as described herein, wherein the oligonucleotide does not have any ribonucleotides (e.g., nucleotides having a 2′-OH group) present in the oligonucleotide. Applicant has surprisingly found that the presence of ribonucleotides (e.g., nucleotides having a 2′-hydroxyl group) within the siNA molecule is not required or essential to support RNAi activity. As such, in one embodiment, all positions within the siNA can include chemically modified nucleotides and/or non-nucleotides such as nucleotides and or non-nucleotides having Formula I, II, III, IV, V, VI, or VII or any combination thereof to the extent that the ability of the siNA molecule to support RNAi activity in a cell is maintained.

[0159] In one embodiment, a siNA molecule of the invention is a single stranded siNA molecule that mediates RNAi activity in a cell or reconstituted in vitro system comprising a single stranded polynucleotide having complementarity to a target nucleic acid sequence. In another embodiment, the single stranded siNA molecule of the invention comprises a 5′-terminal phosphate group. In another embodiment, the single stranded siNA molecule of the invention comprises a 5′-terminal phosphate group and a 3′-terminal phosphate group (e.g., a 2′,3′-cyclic phosphate). In another embodiment, the single stranded siNA molecule of the invention comprises about 15 to about 30 (e.g., about 15, 16, 17, 18, 19, 20, 21, 22, 23, 24, 25, 26, 27, 28, 29, or 30) nucleotides. In yet another embodiment, the single stranded siNA molecule of the invention comprises one or more chemically modified nucleotides or non-nucleotides described herein. For example, all the positions within the siNA molecule can include chemically-modified nucleotides such as nucleotides having any of Formulae I-VII, or any combination thereof to the extent that the ability of the siNA molecule to support RNAi activity in a cell is maintained.

[0160] In one embodiment, a siNA molecule of the invention is a single stranded siNA molecule that mediates RNAi activity or that alternately modulates RNAi activity in a cell or reconstituted in vitro system comprising a single stranded polynucleotide having complementarity to a target nucleic acid sequence, wherein one or more pyrimidine nucleotides present in the siNA are 2′-deoxy-2′-fluoro, 4′-thio, 2′-O-trifluoromethyl, 2′-O-ethyl-trifluoromethoxy, or 2′-O-difluoromethoxy-ethoxy pyrimidine nucleotides (e.g., wherein all pyrimidine nucleotides are 2′-deoxy-2′-fluoro, 4′-thio, 2′-O-trifluoromethyl, 2′-O-ethyl-trifluoromethoxy, or 2′-O-difluoromethoxy-ethoxy pyrimidine nucleotides or alternately a plurality of pyrimidine nucleotides are 2′-deoxy-2′-fluoro, 4′-thio, 2′-O-trifluoromethyl, 2′-O-ethyl-trifluoromethoxy, or 2′-O-difluoromethoxy-ethoxy pyrimidine nucleotides), and wherein any purine nucleotides present in the antisense region are 2′-O-methyl, 4′-thio, 2′-O-trifluoromethyl, 2′-O-ethyl-trifluoromethoxy, or 2′-O-difluoromethoxy-ethoxy purine nucleotides (e.g., wherein all purine nucleotides are 2′-O-methyl, 4′-thio, 2′-O-trifluoromethyl, 2′-O-ethyl-trifluoromethoxy, or 2′-O-difluoromethoxy-ethoxy purine nucleotides or alternately a plurality of purine nucleotides are 2′-O-methyl, 4′-thio, 2′-O-trifluoromethyl, 2′-O-ethyl-trifluoromethoxy, or 2′-O-difluoromethoxy-ethoxy purine nucleotides), and a terminal cap modification, such as any modification described herein or shown in FIG. 10, that is optionally present at the 3′-end, the 5′-end, or both of the 3′ and 5′-ends of the antisense sequence. The siNA optionally further comprises about 1 to about 4 or more (e.g., about 1, 2, 3, 4 or more) terminal 2′-deoxynucleotides at the 3′-end of the siNA molecule, wherein the terminal nucleotides can further comprise one or more (e.g., 1, 2, 3, 4 or more) phosphorothioate, phosphonoacetate, and/or thiophosphonoacetate internucleotide linkages, and wherein the siNA optionally further comprises a terminal phosphate group, such as a 5′-terminal phosphate group. In any of these embodiments, any purine nucleotides present in the antisense region are alternatively 2′-deoxy purine nucleotides (e.g., wherein all purine nucleotides are 2′-deoxy purine nucleotides or alternately a plurality of purine nucleotides are 2′-deoxy purine nucleotides). Also, in any of these embodiments, any purine nucleotides present in the siNA (i.e., purine nucleotides present in the sense and/or antisense region) can alternatively be locked nucleic acid (LNA) nucleotides (e.g., wherein all purine nucleotides are LNA nucleotides or alternately a plurality of purine nucleotides are LNA nucleotides). Also, in any of these embodiments, any purine nucleotides present in the siNA are alternatively 2′-methoxyethyl purine nucleotides (e.g., wherein all purine nucleotides are 2′-methoxyethyl purine nucleotides or alternately a plurality of purine nucleotides are 2′-methoxyethyl purine nucleotides). In another embodiment, any modified nucleotides present in the single stranded siNA molecules of the invention comprise modified nucleotides having properties or characteristics similar to naturally occurring ribonucleotides. For example, the invention features siNA molecules including modified nucleotides having a Northern conformation (e.g., Northern pseudorotation cycle, see for example Saenger, Principles of Nucleic Acid Structure, Springer-Verlag ed., 1984). As such, chemically modified nucleotides present in the single stranded siNA molecules of the invention are preferably resistant to nuclease degradation while at the same time maintaining the capacity to mediate RNAi.

[0161] In one embodiment, a chemically-modified short interfering nucleic acid (siNA) molecule of the invention comprises a sense strand or sense region having two or more (e.g., 2, 3, 4, 5, 6, 7, 8, 9, 10, 11, 12, 13, 14 15, 16, 17, 18, 19, 20, 21, 22, 23, 24, 25, 26, 27, 28, 29, 30 or more) 2′-O-alkyl (e.g. 2′-O-methyl) modifications or any combination thereof. In another embodiment, the 2′-O-alkyl modification is at alternating position in the sense strand or sense region of the siNA, such as position 1, 3, 5, 7, 9, 11, 13, 15, 17, 19, 21 etc. or position 2, 4, 6, 8, 10, 12, 14, 16, 18, 20 etc.

[0162] In one embodiment, a chemically-modified short interfering nucleic acid (siNA) molecule of the invention comprises an antisense strand or antisense region having two or more (e.g., 2, 3, 4, 5, 6, 7, 8, 9, 10, 11, 12, 13, 14 15, 16, 17, 18, 19, 20, 21, 22, 23, 24, 25, 26, 27, 28, 29, 30 or more) 2′-O-alkyl (e.g. 2′-O-methyl) modifications or any combination thereof. In another embodiment, the 2′-O-alkyl modification is at alternating position in the antisense strand or antisense region of the siNA, such as position 1, 3, 5, 7, 9, 11, 13, 15, 17, 19, 21 etc. or position 2, 4, 6, 8, 10, 12, 14, 16, 18, 20 etc.

[0163] In one embodiment, a chemically-modified short interfering nucleic acid (siNA) molecule of the invention comprises a sense strand or sense region and an antisense strand or antisense region, each having two or more (e.g., 2, 3, 4, 5, 6, 7, 8, 9, 10, 11, 12, 13, 14, 15, 16, 17, 18, 19, 20, 21, 22, 23, 24, 25, 26, 27, 28, 29, 30 or more) 2′-O-alkyl (e.g. 2′-O-methyl), 2′-deoxy-2′-fluoro, 2′-deoxy, or abasic chemical modifications or any combination thereof. In another embodiment, the 2′-O-alkyl modification is at alternating position in the sense strand or sense region of the siNA, such as position 1, 3, 5, 7, 9, 11, 13, 15, 17, 19, 21 etc. or position 2, 4, 6, 8, 10, 12, 14, 16, 18, 20 etc. In another embodiment, the 2′-O-alkyl modification is at alternating position in the antisense strand or antisense region of the siNA, such as position 1, 3, 5, 7, 9, 11, 13, 15, 17, 19, 21 etc. or position 2, 4, 6, 8, 10, 12, 14, 16, 18, 20 etc.

[0164] In one embodiment, a siNA molecule of the invention comprises chemically modified nucleotides or non-nucleotides (e.g., having any of Formulae I-VII, such as 2′-deoxy, 2′-deoxy-2′-fluoro, 4′-thio, 2′-O-trifluoromethyl, 2′-O-ethyl-trifluoromethoxy, 2′-O-difluoromethoxy-ethoxy or 2′-O-methyl nucleotides) at alternating positions within one or more strands or regions of the siNA molecule. For example, such chemical modifications can be introduced at every other position of a RNA based siNA molecule, starting at either the first or second nucleotide from the 3′-end or 5′-end of the siNA. In a non-limiting example, a double stranded siNA molecule of the invention in which each strand of the siNA is 21 nucleotides in length is featured wherein positions 1, 3, 5, 7, 9, 11, 13, 15, 17, 19 and 21 of each strand are chemically modified (e.g., with compounds having any of Formulae I-VII, such as such as 2′-deoxy, 2′-deoxy-2′-fluoro, 4′-thio, 2′-O-trifluoromethyl, 2′-O-ethyl-trifluoromethoxy, 2′-O-difluoromethoxy-ethoxy or 2′-O-methyl nucleotides). In another non-limiting example, a double stranded siNA molecule of the invention in which each strand of the siNA is 21 nucleotides in length is featured wherein positions 2, 4, 6, 8, 10, 12, 14, 16, 18, and 20 of each strand are chemically modified (e.g., with compounds having any of Formulae I-VII, such as such as 2′-deoxy, 2′-deoxy-2′-fluoro, 4′-thio, 2′-O-trifluoromethyl, 2′-O-ethyl-trifluoromethoxy, 2′-O-difluoromethoxy-ethoxy or 2′-O-methyl nucleotides). In one embodiment, one strand of the double stranded siNA molecule comprises chemical modifications at positions 2, 4, 6, 8, 10, 12, 14, 16, 18, and 20 and chemical modifications at positions 1, 3, 5, 7, 9, 11, 13, 15, 17, 19 and 21. Such siNA molecules can further comprise terminal cap moieties and/or backbone modifications as described herein.

[0165] In one embodiment, a siNA molecule of the invention comprises the following features: if purine nucleotides are present at the 5′-end (e.g., at any of terminal nucleotide positions 1, 2, 3, 4, 5, or 6 from the 5′-end) of the antisense strand or antisense region (otherwise referred to as the guide sequence or guide strand) of the siNA molecule then such purine nucleosides are ribonucleotides. In another embodiment, the purine ribonucleotides, when present, are base paired to nucleotides of the sense strand or sense region (otherwise referred to as the passenger strand) of the siNA molecule. Such purine ribonucleotides can be present in a siNA stabilization motif that otherwise comprises modified nucleotides.

[0166] In one embodiment, a siNA molecule of the invention comprises the following features: if pyrimidine nucleotides are present at the 5′-end (e.g., at any of terminal nucleotide positions 1, 2, 3, 4, 5, or 6 from the 5′-end) of the antisense strand or antisense region (otherwise referred to as the guide sequence or guide strand) of the siNA molecule then such pyrimidine nucleosides are ribonucleotides. In another embodiment, the pyrimidine ribonucleotides, when present, are base paired to nucleotides of the sense strand or sense region (otherwise referred to as the passenger strand) of the siNA molecule. Such pyrimidine ribonucleotides can be present in a siNA stabilization motif that otherwise comprises modified nucleotides.

[0167] In one embodiment, a siNA molecule of the invention comprises the following features: if pyrimidine nucleotides are present at the 5′-end (e.g., at any of terminal nucleotide positions 1, 2, 3, 4, 5, or 6 from the 5′-end) of the antisense strand or antisense region (otherwise referred to as the guide sequence or guide strand) of the siNA molecule then such pyrimidine nucleosides are modified nucleotides. In another embodiment, the modified pyrimidine nucleotides, when present, are base paired to nucleotides of the sense strand or sense region (otherwise referred to as the passenger strand) of the siNA molecule. Non-limiting examples of modified pyrimidine nucleotides include those having any of Formulae I-VII, such as such as 2′-deoxy, 2′-deoxy-2′-fluoro, 4′-thio, 2′-O-trifluoromethyl, 2′-O-ethyl-trifluoromethoxy, 2′-O-difluoromethoxy-ethoxy or 2′-O-methyl nucleotides.

[0168] In one embodiment, the invention features a double stranded nucleic acid molecule having structure SI:

[chemical structure]

[0169] wherein each N is independently a nucleotide; each B is a terminal cap moiety that can be present or absent; (N) represents non-base paired or overhanging nucleotides which can be unmodified or chemically modified; [N] represents nucleotide positions wherein any purine nucleotides when present are ribonucleotides; X1 and X2 are independently integers from about 0 to about 4; X3 is an integer from about 9 to about 30; X4 is an integer from about 11 to about 30, provided that the sum of X4 and X5 is between 17-36; X5 is an integer from about 1 to about 6; NX3 is complementary to NX4 and NX5, and
[0170] (a) any pyrimidine nucleotides present in the antisense strand (lower strand) are 2′-deoxy-2′-fluoro nucleotides; any purine nucleotides present in the antisense strand (lower strand) other than the purines nucleotides in the [N] nucleotide positions, are independently 2′-O-methyl nucleotides, 2′-deoxyribonucleotides or a combination of 2′-deoxyribonucleotides and 2′-O-methyl nucleotides;
[0171] (b) any pyrimidine nucleotides present in the sense strand (upper strand) are 2′-deoxy-2′-fluoro nucleotides; any purine nucleotides present in the sense strand (upper strand) are independently 2′-deoxyribonucleotides, 2′-O-methyl nucleotides or a combination of 2′-deoxyribonucleotides and 2′-O-methyl nucleotides; and
[0172] (c) any (N) nucleotides are optionally 2′-O-methyl, 2′-deoxy-2′-fluoro, or deoxyribonucleotides.

[0173] In one embodiment, the invention features a double stranded nucleic acid molecule having structure SII:

[chemical structure]

[0174] wherein each N is independently a nucleotide; each B is a terminal cap moiety that can be present or absent; (N) represents non-base paired or overhanging nucleotides which can be unmodified or chemically modified; [N] represents nucleotide positions wherein any purine nucleotides when present are ribonucleotides; X1 and X2 are independently integers from about 0 to about 4; X3 is an integer from about 9 to about 30; X4 is an integer from about 11 to about 30, provided that the sum of X4 and X5 is between 17-36; X5 is an integer from about 1 to about 6; NX3 is complementary to NX4 and NX5, and
[0175] (a) any pyrimidine nucleotides present in the antisense strand (lower strand) are 2′-deoxy-2′-fluoro nucleotides; any purine nucleotides present in the antisense strand (lower strand) other than the purines nucleotides in the [N] nucleotide positions, are 2′-O-methyl nucleotides;
[0176] (b) any pyrimidine nucleotides present in the sense strand (upper strand) are ribonucleotides; any purine nucleotides present in the sense strand (upper strand) are ribonucleotides; and
[0177] (c) any (N) nucleotides are optionally 2′-O-methyl, 2′-deoxy-2′-fluoro, or deoxyribonucleotides.

[0178] In one embodiment, the invention features a double stranded nucleic acid molecule having structure SIII:

[chemical structure]

[0179] wherein each N is independently a nucleotide; each B is a terminal cap moiety that can be present or absent; (N) represents non-base paired or overhanging nucleotides which can be unmodified or chemically modified; [N] represents nucleotide positions wherein any purine nucleotides when present are ribonucleotides; X1 and X2 are independently integers from about 0 to about 4; X3 is an integer from about 9 to about 30; X4 is an integer from about 11 to about 30, provided that the sum of X4 and X5 is between 17-36; X5 is an integer from about 1 to about 6; NX3 is complementary to NX4 and NX5, and
[0180] (a) any pyrimidine nucleotides present in the antisense strand (lower strand) are 2′-deoxy-2′-fluoro nucleotides; any purine nucleotides present in the antisense strand (lower strand) other than the purines nucleotides in the [N] nucleotide positions, are 2′-O-methyl nucleotides;
[0181] (b) any pyrimidine nucleotides present in the sense strand (upper strand) are 2′-deoxy-2′-fluoro nucleotides; any purine nucleotides present in the sense strand (upper strand) are ribonucleotides; and
[0182] (c) any (N) nucleotides are optionally 2′-O-methyl, 2′-deoxy-2′-fluoro, or deoxyribonucleotides.

[0183] In one embodiment, the invention features a double stranded nucleic acid molecule having structure SIV:

[chemical structure]

[0184] wherein each N is independently a nucleotide; each B is a terminal cap moiety that can be present or absent; (N) represents non-base paired or overhanging nucleotides which can be unmodified or chemically modified; [N] represents nucleotide positions wherein any purine nucleotides when present are ribonucleotides; X1 and X2 are independently integers from about 0 to about 4; X3 is an integer from about 9 to about 30; X4 is an integer from about 11 to about 30, provided that the sum of X4 and X5 is between 17-36; X5 is an integer from about 1 to about 6; NX3 is complementary to NX4 and NX5, and
[0185] (a) any pyrimidine nucleotides present in the antisense strand (lower strand) are 2′-deoxy-2′-fluoro nucleotides; any purine nucleotides present in the antisense strand (lower strand) other than the purines nucleotides in the [N] nucleotide positions, are 2′-O-methyl nucleotides;
[0186] (b) any pyrimidine nucleotides present in the sense strand (upper strand) are 2′-deoxy-2′-fluoro nucleotides; any purine nucleotides present in the sense strand (upper strand) are deoxyribonucleotides; and
[0187] (c) any (N) nucleotides are optionally 2′-O-methyl, 2′-deoxy-2′-fluoro, or deoxyribonucleotides.

[0188] In one embodiment, the invention features a double stranded nucleic acid molecule having structure SV:

[chemical structure]

[0189] wherein each N is independently a nucleotide; each B is a terminal cap moiety that can be present or absent; (N) represents non-base paired or overhanging nucleotides which can be unmodified or chemically modified; [N] represents nucleotide positions wherein any purine nucleotides when present are ribonucleotides; X1 and X2 are independently integers from about 0 to about 4; X3 is an integer from about 9 to about 30; X4 is an integer from about 11 to about 30, provided that the sum of X4 and X5 is between 17-36; X5 is an integer from about 1 to about 6; NX3 is complementary to NX4 and NX5, and
[0190] (a) any pyrimidine nucleotides present in the antisense strand (lower strand) are nucleotides having a ribo-like configuration (e.g., Northern or A-form helix configuration); any purine nucleotides present in the antisense strand (lower strand) other than the purines nucleotides in the [N] nucleotide positions, are 2′-O-methyl nucleotides;
[0191] (b) any pyrimidine nucleotides present in the sense strand (upper strand) are nucleotides having a ribo-like configuration (e.g., Northern or A-form helix configuration); any purine nucleotides present in the sense strand (upper strand) are 2′-O-methyl nucleotides; and
[0192] (c) any (N) nucleotides are optionally 2′-O-methyl, 2′-deoxy-2′-fluoro, or deoxyribonucleotides.

[0193] In one embodiment, the invention features a double stranded nucleic acid molecule having structure SVI:

[chemical structure]

[0194] wherein each N is independently a nucleotide; each B is a terminal cap moiety that can be present or absent; (N) represents non-base paired or overhanging nucleotides which can be unmodified or chemically modified; [N] represents nucleotide positions comprising sequence that renders the 5′-end of the antisense strand (lower strand) less thermally stable than the 5′-end of the sense strand (upper strand); X1 and X2 are independently integers from about 0 to about 4; X3 is an integer from about 9 to about 30; X4 is an integer from about 11 to about 30, provided that the sum of X4 and X5 is between 17-36; X5 is an integer from about 1 to about 6; NX3 is complementary to NX4 and NX5, and
[0195] (a) any pyrimidine nucleotides present in the antisense strand (lower strand) are 2′-deoxy-2′-fluoro nucleotides; any purine nucleotides present in the antisense strand (lower strand) other than the purines nucleotides in the [N] nucleotide positions, are independently 2′-O-methyl nucleotides, 2′-deoxyribonucleotides or a combination of 2′-deoxyribonucleotides and 2′-O-methyl nucleotides;
[0196] (b) any pyrimidine nucleotides present in the sense strand (upper strand) are 2′-deoxy-2′-fluoro nucleotides; any purine nucleotides present in the sense strand (upper strand) are independently 2′-deoxyribonucleotides, 2′-O-methyl nucleotides or a combination of 2′-deoxyribonucleotides and 2′-O-methyl nucleotides; and
[0197] (c) any (N) nucleotides are optionally 2′-O-methyl, 2′-deoxy-2′-fluoro, or deoxyribonucleotides.

[0198] In one embodiment, the invention features a double stranded nucleic acid molecule having structure SVII:

[chemical structure]

[0199] wherein each N is independently a nucleotide; each B is a terminal cap moiety that can be present or absent; (N) represents non-base paired or overhanging nucleotides; X1 and X2 are independently integers from about 0 to about 4; X3 is an integer from about 9 to about 30; X4 is an integer from about 11 to about 30; NX3 is complementary to NX4, and any (N) nucleotides are 2′-O-methyl and/or 2′-deoxy-2′-fluoro nucleotides.

[0200] In one embodiment, the invention features a double stranded nucleic acid molecule having structure SVIII:

[chemical structure]

[0201] wherein each N is independently a nucleotide; each B is a terminal cap moiety that can be present or absent; (N) represents non-base paired or overhanging nucleotides which can be unmodified or chemically modified; [N] represents nucleotide positions comprising sequence that renders the 5′-end of the antisense strand (lower strand) less thermally stable than the 5′-end of the sense strand (upper strand); [N] represents nucleotide positions that are ribonucleotides; X1 and X2 are independently integers from about 0 to about 4; X3 is an integer from about 9 to about 15; X4 is an integer from about 11 to about 30, provided that the sum of X4 and X5 is between 17-36; X5 is an integer from about 1 to about 6; X6 is an integer from about 1 to about 4; X7 is an integer from about 9 to about 15; NX7, NX6, and NX3 are complementary to NX4 and NX5, and
[0202] (a) any pyrimidine nucleotides present in the antisense strand (lower strand) are 2′-deoxy-2′-fluoro nucleotides; any purine nucleotides present in the antisense strand (lower strand) other than the purines nucleotides in the [N] nucleotide positions, are independently 2′-O-methyl nucleotides, 2′-deoxyribonucleotides or a combination of 2′-deoxyribonucleotides and 2′-O-methyl nucleotides;
[0203] (b) any pyrimidine nucleotides present in the sense strand (upper strand) are 2′-deoxy-2′-fluoro nucleotides other than [N] nucleotides; any purine nucleotides present in the sense strand (upper strand) are independently 2′-deoxyribonucleotides, 2′-O-methyl nucleotides or a combination of 2′-deoxyribonucleotides and 2′-O-methyl nucleotides other than [N] nucleotides; and
[0204] (c) any (N) nucleotides are optionally 2′-O-methyl, 2′-deoxy-2′-fluoro, or deoxyribonucleotides.

[0205] In one embodiment, the invention features a double stranded nucleic acid molecule having structure SIX:

[chemical structure]

[0206] wherein each N is independently a nucleotide; each B is a terminal cap moiety that can be present or absent; (N) represents non-base paired or overhanging nucleotides which can be unmodified or chemically modified; [N] represents nucleotide positions that are ribonucleotides; X1 and X2 are independently integers from about 0 to about 4; X3 is an integer from about 9 to about 30; X4 is an integer from about 11 to about 30, provided that the sum of X4 and X5 is between 17-36; X5 is an integer from about 1 to about 6; NX3 is complementary to NX4 and NX5, and
[0207] (a) any pyrimidine nucleotides present in the antisense strand (lower strand) are 2′-deoxy-2′-fluoro nucleotides; any purine nucleotides present in the antisense strand (lower strand) other than the purines nucleotides in the [N] nucleotide positions, are independently 2′-O-methyl nucleotides, 2′-deoxyribonucleotides or a combination of 2′-deoxyribonucleotides and 2′-O-methyl nucleotides;
[0208] (b) any pyrimidine nucleotides present in the sense strand (upper strand) are 2′-deoxy-2′-fluoro nucleotides; any purine nucleotides present in the sense strand (upper strand) are independently 2′-deoxyribonucleotides, 2′-O-methyl nucleotides or a combination of 2′-deoxyribonucleotides and 2′-O-methyl nucleotides; and
[0209] (c) any (N) nucleotides are optionally 2′-O-methyl, 2′-deoxy-2′-fluoro, or deoxyribonucleotides.

[0210] In one embodiment, the invention features a double stranded nucleic acid molecule having structure SX:

[chemical structure]

[0211] wherein each N is independently a nucleotide; each B is a terminal cap moiety that can be present or absent; (N) represents non-base paired or overhanging nucleotides which can be unmodified or chemically modified; [N] represents nucleotide positions that are ribonucleotides; X1 and X2 are independently integers from about 0 to about 4; X3 is an integer from about 9 to about 30; X4 is an integer from about 11 to about 30, provided that the sum of X4 and X5 is between 17-36; X5 is an integer from about 1 to about 6; NX3 is complementary to NX4 and NX5, and
[0212] (a) any pyrimidine nucleotides present in the antisense strand (lower strand) are 2′-deoxy-2′-fluoro nucleotides; any purine nucleotides present in the antisense strand (lower strand) other than the purines nucleotides in the [N] nucleotide positions, are 2′-O-methyl nucleotides;
[0213] (b) any pyrimidine nucleotides present in the sense strand (upper strand) are ribonucleotides; any purine nucleotides present in the sense strand (upper strand) are ribonucleotides; and
[0214] (c) any (N) nucleotides are optionally 2′-O-methyl, 2′-deoxy-2′-fluoro, or deoxyribonucleotides.

[0215] In one embodiment, the invention features a double stranded nucleic acid molecule having structure SXI:

[chemical structure]

[0216] wherein each N is independently a nucleotide; each B is a terminal cap moiety that can be present or absent; (N) represents non-base paired or overhanging nucleotides which can be unmodified or chemically modified; [N] represents nucleotide positions that are ribonucleotides; X1 and X2 are independently integers from about 0 to about 4; X3 is an integer from about 9 to about 30; X4 is an integer from about 11 to about 30, provided that the sum of X4 and X5 is between 17-36; X5 is an integer from about 1 to about 6; NX3 is complementary to NX4 and NX5, and
[0217] (a) any pyrimidine nucleotides present in the antisense strand (lower strand) are 2′-deoxy-2′-fluoro nucleotides; any purine nucleotides present in the antisense strand (lower strand) other than the purines nucleotides in the [N] nucleotide positions, are 2′-O-methyl nucleotides;
[0218] (b) any pyrimidine nucleotides present in the sense strand (upper strand) are 2′-deoxy-2′-fluoro nucleotides; any purine nucleotides present in the sense strand (upper strand) are ribonucleotides; and
[0219] (c) any (N) nucleotides are optionally 2′-O-methyl, 2′-deoxy-2′-fluoro, or deoxyribonucleotides.

[0220] In one embodiment, the invention features a double stranded nucleic acid molecule having structure SXII:

[chemical structure]

[0221] wherein each N is independently a nucleotide; each B is a terminal cap moiety that can be present or absent; (N) represents non-base paired or overhanging nucleotides which can be unmodified or chemically modified; [N] represents nucleotide positions that are ribonucleotides; X1 and X2 are independently integers from about 0 to about 4; X3 is an integer from about 9 to about 30; X4 is an integer from about 11 to about 30, provided that the sum of X4 and X5 is between 17-36; X5 is an integer from about 1 to about 6; NX3 is complementary to NX4 and NX5, and
[0222] (a) any pyrimidine nucleotides present in the antisense strand (lower strand) are 2′-deoxy-2′-fluoro nucleotides; any purine nucleotides present in the antisense strand (lower strand) other than the purines nucleotides in the [N] nucleotide positions, are 2′-O-methyl nucleotides;
[0223] (b) any pyrimidine nucleotides present in the sense strand (upper strand) are 2′-deoxy-2′-fluoro nucleotides; any purine nucleotides present in the sense strand (upper strand) are deoxyribonucleotides; and
[0224] (c) any (N) nucleotides are optionally 2′-O-methyl, 2′-deoxy-2′-fluoro, or deoxyribonucleotides.

[0225] In one embodiment, the invention features a double stranded nucleic acid molecule having structure SXIII:

[chemical structure]

[0226] wherein each N is independently a nucleotide; each B is a terminal cap moiety that can be present or absent; (N) represents non-base paired or overhanging nucleotides which can be unmodified or chemically modified; [N] represents nucleotide positions that are ribonucleotides; X1 and X2 are independently integers from about 0 to about 4; X3 is an integer from about 9 to about 30; X4 is an integer from about 11 to about 30, provided that the sum of X4 and X5 is between 17-36; X5 is an integer from about 1 to about 6; NX3 is complementary to NX4 and NX5, and
[0227] (a) any pyrimidine nucleotides present in the antisense strand (lower strand) are nucleotides having a ribo-like configuration (e.g., Northern or A-form helix configuration); any purine nucleotides present in the antisense strand (lower strand) other than the purines nucleotides in the [N] nucleotide positions, are 2′-O-methyl nucleotides;
[0228] (b) any pyrimidine nucleotides present in the sense strand (upper strand) are nucleotides having a ribo-like configuration (e.g., Northern or A-form helix configuration); any purine nucleotides present in the sense strand (upper strand) are 2′-O-methyl nucleotides; and
[0229] (c) any (N) nucleotides are optionally 2′-O-methyl, 2′-deoxy-2′-fluoro, or deoxyribonucleotides.

[0230] In one embodiment, the invention features a double stranded nucleic acid molecule having structure SXIV:

[chemical structure]

[0231] wherein each N is independently a nucleotide; each B is a terminal cap moiety that can be present or absent; (N) represents non-base paired or overhanging nucleotides which can be unmodified or chemically modified; [N] represents nucleotide positions that are ribonucleotides; [N] represents nucleotide positions that are ribonucleotides; X1 and X2 are independently integers from about 0 to about 4; X3 is an integer from about 9 to about 15; X4 is an integer from about 11 to about 30, provided that the sum of X4 and X5 is between 17-36; X5 is an integer from about 1 to about 6; X6 is an integer from about 1 to about 4; X7 is an integer from about 9 to about 15; NX7, NX6, and NX3 are complementary to NX4 and NX5, and
[0232] (a) any pyrimidine nucleotides present in the antisense strand (lower strand) are 2′-deoxy-2′-fluoro nucleotides; any purine nucleotides present in the antisense strand (lower strand) other than the purines nucleotides in the [N] nucleotide positions, are independently 2′-O-methyl nucleotides, 2′-deoxyribonucleotides or a combination of 2′-deoxyribonucleotides and 2′-O-methyl nucleotides;
[0233] (b) any pyrimidine nucleotides present in the sense strand (upper strand) are 2′-deoxy-2′-fluoro nucleotides other than [N] nucleotides; any purine nucleotides present in the sense strand (upper strand) are independently 2′-deoxyribonucleotides, 2′-O-methyl nucleotides or a combination of 2′-deoxyribonucleotides and 2′-O-methyl nucleotides other than [N] nucleotides; and
[0234] (c) any (N) nucleotides are optionally 2′-O-methyl, 2′-deoxy-2′-fluoro, or deoxyribonucleotides.

[0235] In one embodiment, a double stranded nucleic acid molecule having any of structure SI, SII, SIII, SIV, SV, SVI, SVII, SVIII, SIX, SX, SXII, SXIII, or SXIV comprises a terminal phosphate group at the 5′-end of the antisense strand or antisense region of the nucleic acid molecule.

[0236] In one embodiment, a double stranded nucleic acid molecule having any of structure SI, SII, SIII, SIV, SV, SVI, SVII, SVIII, SIX, SX, SXII, SXIII, or SXIV comprises X5=1, 2, or 3; each X1 and X2=1 or 2; X3=12, 13, 14, 15, 16, 17, 18, 19, 20, 21, 22, 23, 24, 25, 26, 27, 28, 29, or 30, and X4=15, 16, 17, 18, 19, 20, 21, 22, 23, 24, 25, 26, 27, 28, 29, or 30.

[0237] In one embodiment, a double stranded nucleic acid molecule having any of structure SI, SII, SIII, SIV, SV, SVI, SVII, SVIII, SIX, SX, SXII, SXIII, or SXIV comprises X5=1; each X1 and X2=2; X3=19, and X4=18.

[0238] In one embodiment, a double stranded nucleic acid molecule having any of structure SI, SII, SIII, SIV, SV, SVI, SVII, SVIII, SIX, SX, SXII, SXIII, or SXIV comprises X5=2; each X1 and X2=2; X3=19, and X4=17

[0239] In one embodiment, a double stranded nucleic acid molecule having any of structure SI, SII, SIII, SIV, SV, SVI, SVII, SVIII, SIX, SX, SXII, SXIII, or SXIV comprises X5=3; each X1 and X2=2; X3=19, and X4=16.

[0240] In one embodiment, a double stranded nucleic acid molecule having any of structure SI, SII, SIII, SIV, SV, SVI, SVII, SVIII, SIX, SX, SXII, SXIII, or SXIV comprises B at the 3′ and 5′ ends of the sense strand or sense region.

[0241] In one embodiment, a double stranded nucleic acid molecule having any of structure SI, SII, SIII, SIV, SV, SVI, SVII, SVIII, SIX, SX, SXII, SXIII, or SXIV comprises B at the 3′-end of the antisense strand or antisense region.

[0242] In one embodiment, a double stranded nucleic acid molecule having any of structure SI, SII, SIII, SIV, SV, SVI, SVII, SVIII, SIX, SX, SXII, SXIII, or SXIV comprises B at the 3′ and 5′ ends of the sense strand or sense region and B at the 3′-end of the antisense strand or antisense region.

[0243] In one embodiment, a double stranded nucleic acid molecule having any of structure SI, SII, SIII, SIV, SV, SVI, SVII, SVIII, SIX, SX, SXII, SXIII, or SXIV further comprises one or more phosphorothioate internucleotide linkages at the first terminal (N) on the 3′ end of the sense strand, antisense strand, or both sense strand and antisense strands of the nucleic acid molecule. For example, a double stranded nucleic acid molecule can comprise X1 and/or X2=2 having overhanging nucleotide positions with a phosphorothioate internucleotide linkage, e.g., (NsN) where “s” indicates phosphorothioate.

[0244] In one embodiment, a double stranded nucleic acid molecule having any of structure SI, SII, SIII, SIV, SV, SVI, SVII, SVIII, SIX, SX, SXII, SXIII, or SXIV comprises (N) nucleotides that are 2′-O-methyl nucleotides.

[0245] In one embodiment, a double stranded nucleic acid molecule having any of structure SI, SII, SIII, SIV, SV, SVI, SVII, SVIII, SIX, SX, SXII, SXIII, or SXIV comprises (N) nucleotides that are 2′-deoxy nucleotides.

[0246] In one embodiment, a double stranded nucleic acid molecule having any of structure SI, SII, SIII, SIV, SV, SVI, SVII, SVIII, SIX, SX, SXII, SXIII, or SXIV comprises (N) nucleotides in the antisense strand (lower strand) that are complementary to nucleotides in a target polynucleotide sequence (e.g., HCV target and/or HCV pathway/host target sequence) having complementary to the N and [N] nucleotides of the antisense (lower) strand.

[0247] In one embodiment, a double stranded nucleic acid molecule having any of structure SI, SII, SIII, SIV, SV, SVI, SVII, SVIII, SIX, SX, SXII, SXIII, or SXIV comprises (N) nucleotides in the sense strand (upper strand) that comprise a contiguous nucleotide sequence of about 15 to about 30 nucleotides of a target polynucleotide sequence (e.g., HCV target and/or HCV pathway/host target sequence).

[0248] In one embodiment, a double stranded nucleic acid molecule having any of structure SI, SII, SIII, SIV, SV, SVI, SVII, SVIII, SIX, SX, SXII, SXIII, or SXIV comprises (N) nucleotides in the sense strand (upper strand) that comprise nucleotide sequence corresponding a target polynucleotide sequence (e.g., HCV target and/or HCV pathway/host target sequence) having complementary to the antisense (lower) strand such that the contiguous (N) and N nucleotide sequence of the sense strand comprises nucleotide sequence of the target nucleic acid sequence (e.g., HCV target and/or HCV pathway/host target sequence).

[0249] In one embodiment, a double stranded nucleic acid molecule having any of structure SVIII or SXIV comprises B only at the 5′-end of the sense (upper) strand of the double stranded nucleic acid molecule.

[0250] In one embodiment, a double stranded nucleic acid molecule having any of structure SI, SII, SIII, SIV, SV, SVI, SVII, SVIII, SIX, SX, SXII, SXIII, or SXIV further comprises an unpaired terminal nucleotide at the 5′-end of the antisense (lower) strand. The unpaired nucleotide is not complementary to the sense (upper) strand. In one embodiment, the unpaired terminal nucleotide is complementary to a target polynucleotide sequence having complementary to the N and [N] nucleotides of the antisense (lower) strand. In another embodiment, the unpaired terminal nucleotide is not complementary to a target polynucleotide sequence having complementary to the N and [N] nucleotides of the antisense (lower) strand.

[0251] In one embodiment, a double stranded nucleic acid molecule having any of structure SVIII or SXIV comprises X6=1 and X3=10.

[0252] In one embodiment, a double stranded nucleic acid molecule having any of structure SVIII or SXIV comprises X6=2 and X3=9.

[0253] In one embodiment, the invention features a composition comprising a siNA molecule or double stranded nucleic acid molecule or RNAi inhibitor formulated as any of formulation LNP-051; LNP-053; LNP-054; LNP-069; LNP-073; LNP-077; LNP-080; LNP-082; LNP-083; LNP-060; LNP-061; LNP-086; LNP-097; LNP-098; LNP-099; LNP-100; LNP-101; LNP-102; LNP-103; or LNP-104 (see Table VI).

[0254] In one embodiment, the invention features a composition comprising a first double stranded nucleic and a second double stranded nucleic acid molecule each having a first strand and a second strand that are complementary to each other, wherein the second strand of the first double stranded nucleic acid molecule comprises sequence complementary to a first target sequence and the second strand of the second double stranded nucleic acid molecule comprises sequence complementary to a second target or pathway target sequence.

[0255] In one embodiment, the invention features a composition comprising a first double stranded nucleic and a second double stranded nucleic acid molecule each having a first strand and a second strand that are complementary to each other, wherein the second strand of the first double stranded nucleic acid molecule comprises sequence complementary to HCV sequence having SEQ ID NO: 1444 and the second strand of the second double stranded nucleic acid molecule comprises sequence complementary to HCV sequence having SEQ ID NO: 1417. In another embodiment, the first strand and the second strand of the first double stranded nucleic acid molecule comprise SEQ ID NOs: 1796 and 2010 respectively, and the first strand and the second strand of the second double stranded nucleic acid molecule comprise SEQ ID NOs: 1677 and 2011 respectively. In another embodiment, the first strand and the second strand of the first double stranded nucleic acid molecule comprise SEQ ID NOs: 1796 and 2012 respectively, and the first strand and the second strand of the second double stranded nucleic acid molecule comprise SEQ ID NOs: 1677 and 2013 respectively.

[0256] In another embodiment, the first strand and the second strand of the first double stranded nucleic acid molecule comprise SEQ ID NOs: 1796 and 2102 respectively, and the first strand and the second strand of the second double stranded nucleic acid molecule comprise SEQ ID NOs: 1677 and 2103 respectively.

[0257] In any of the above-described composition embodiments, the composition can further comprise various lipid and polyethyleneglycol-conjugates. In one embodiment, the composition further comprises a cationic lipid, a neutral lipid, and a polyethyleneglycol-conjugate. In another embodiment, the composition further comprises a cationic lipid, a neutral lipid, a polyethyleneglycol-conjugate, and a cholesterol. In another embodiment, the composition further comprises a polyethyleneglycol-conjugate, a cholesterol, and a surfactant. In one embodiment, the cationic lipid is selected from the group consisting of CLinDMA, pCLinDMA, eCLinDMA, DMOBA, and DMLBA. In one embodiment, the neutral lipid is selected from the group consisting of DSPC, DOBA, and cholesterol. In one embodiment, the polyethyleneglycol-conjugate is selected from the group consisting of a PEG-dimyristoyl glycerol and PEG-cholesterol. In one embodiment, the PEG is 2KPEG. In one embodiment, the surfactant is selected from the group consisting of palmityl alcohol, stearyl alcohol, oleyl alcohol and linoleyl alcohol. In one embodiment, the cationic lipid is CLinDMA, the neutral lipid is DSPC, the polyethylene glycol conjugate is 2KPEG-DMG, the cholesterol is cholesterol, and the surfactant is linoleyl alcohol. In one embodiment, the CLinDMA, the DSPC, the 2KPEG-DMG, the cholesterol, and the linoleyl alcohol are present in molar ratio of 43:38:10:2:7 respectively.

[0258] In any of the embodiments herein, the siNA molecule of the invention modulates expression of one or more targets via RNA interference or the inhibition of RNA interference. In one embodiment, the RNA interference is RISC mediated cleavage of the target (e.g., siRNA mediated RNA interference). In one embodiment, the RNA interference is translational inhibition of the target (e.g., miRNA mediated RNA interference). In one embodiment, the RNA interference is transcriptional inhibition of the target (e.g., siRNA mediated transcriptional silencing). In one embodiment, the RNA interference takes place in the cytoplasm. In one embodiment, the RNA interference takes place in the nucleus.

[0259] In any of the embodiments herein, the siNA molecule of the invention modulates expression of one or more targets via inhibition of an endogenous target RNA, such as an endogenous mRNA, siRNA, miRNA, or alternately though inhibition of RISC.

[0260] In one embodiment, the invention features one or more RNAi inhibitors that modulate the expression of one or more gene targets by miRNA inhibition, siRNA inhibition, or RISC inhibition.

[0261] In one embodiment, a RNAi inhibitor of the invention is a siNA molecule as described herein that has one or more strands that are complementary to one or more target miRNA or siRNA molecules.

[0262] In one embodiment, the RNAi inhibitor of the invention is an antisense molecule that is complementary to a target miRNA or siRNA molecule or a portion thereof. An antisense RNAi inhibitor of the invention can be of length of about 10 to about 40 nucleotides in length (e.g., 10, 11, 12, 13, 14, 15, 16, 17, 18, 19, 20, 21, 22, 23, 24, 25, 26, 27, 28, 29, 30, 31, 32, 33, 34, 35, 36, 37, 38, 39, or 40 nucleotides in length). An antisense RNAi inhibitor of the invention can comprise one or more modified nucleotides or non-nucleotides as described herein (see for example molecules having any of Formulae I-VII herein or any combination thereof). In one embodiment, an antisense RNAi inhibitor of the invention can comprise one or more or all 2′-O-methyl nucleotides. In one embodiment, an antisense RNAi inhibitor of the invention can comprise one or more or all 2′-deoxy-2′-fluoro nucleotides. In one embodiment, an antisense RNAi inhibitor of the invention can comprise one or more or all 2′-O-methoxy-ethyl (also known as 2′-methoxyethoxy or MOE) nucleotides. In one embodiment, an antisense RNAi inhibitor of the invention can comprise one or more or all phosphorothioate internucleotide linkages. In one embodiment, an antisense RNA inhibitor or the invention can comprise a terminal cap moiety at the 3′-end, the 5′-end, or both the 5′ and 3′ ends of the antisense RNA inhibitor.

[0263] In one embodiment, a RNAi inhibitor of the invention is a nucleic acid aptamer having binding affinity for RISC, such as a regulatable aptamer (see for example An et al., 2006, RNA, 12:710-716). An aptamer RNAi inhibitor of the invention can be of length of about 10 to about 50 nucleotides in length (e.g., 10, 11, 12, 13, 14, 15, 16, 17, 18, 19, 20, 21, 22, 23, 24, 25, 26, 27, 28, 29, 30, 31, 32, 33, 34, 35, 36, 37, 38, 39, 40, 41, 42, 43, 44, 45, 46, 47, 48, 49, or 50 nucleotides in length). An aptamer RNAi inhibitor of the invention can comprise one or more modified nucleotides or non-nucleotides as described herein (see for example molecules having any of Formulae I-VII herein or any combination thereof). In one embodiment, an aptamer RNAi inhibitor of the invention can comprise one or more or all 2′-O-methyl nucleotides. In one embodiment, an aptamer RNAi inhibitor of the invention can comprise one or more or all 2′-deoxy-2′-fluoro nucleotides. In one embodiment, an aptamer RNAi inhibitor of the invention can comprise one or more or all 2′-O-methoxy-ethyl (also known as 2′-methoxyethoxy or MOE) nucleotides. In one embodiment, an aptamer RNAi inhibitor of the invention can comprise one or more or all phosphorothioate internucleotide linkages. In one embodiment, an aptamer RNA inhibitor or the invention can comprise a terminal cap moiety at the 3′-end, the 5;′-end, or both the 5′ and 3′ ends of the aptamer RNA inhibitor.

[0264] In one embodiment, the invention features a method for modulating the expression of a target gene within a cell comprising: (a) synthesizing a siNA molecule of the invention, which can be chemically-modified or unmodified, wherein one of the siNA strands comprises a sequence complementary to RNA of the target gene; and (b) introducing the siNA molecule into a cell under conditions suitable to modulate (e.g., inhibit) the expression of the target gene in the cell.

[0265] In one embodiment, the invention features a method for modulating the expression of a target gene within a cell comprising: (a) synthesizing a siNA molecule of the invention, which can be chemically-modified or unmodified, wherein one of the siNA strands comprises a sequence complementary to RNA of the target gene and wherein the sense strand sequence of the siNA comprises a sequence identical or substantially similar to the sequence of the target RNA; and (b) introducing the siNA molecule into a cell under conditions suitable to modulate (e.g., inhibit) the expression of the target gene in the cell.

[0266] In another embodiment, the invention features a method for modulating the expression of more than one target gene within a cell comprising: (a) synthesizing siNA molecules of the invention, which can be chemically-modified or unmodified, wherein one of the siNA strands comprises a sequence complementary to RNA of the target genes; and (b) introducing the siNA molecules into a cell under conditions suitable to modulate (e.g., inhibit) the expression of the target genes in the cell.

[0267] In another embodiment, the invention features a method for modulating the expression of two or more target genes within a cell comprising: (a) synthesizing one or more siNA molecules of the invention, which can be chemically-modified or unmodified, wherein the siNA strands comprise sequences complementary to RNA of the target genes and wherein the sense strand sequences of the siNAs comprise sequences identical or substantially similar to the sequences of the target RNAs; and (b) introducing the siNA molecules into a cell under conditions suitable to modulate (e.g., inhibit) the expression of the target genes in the cell.

[0268] In another embodiment, the invention features a method for modulating the expression of more than one target gene within a cell comprising: (a) synthesizing a siNA molecule of the invention, which can be chemically-modified or unmodified, wherein one of the siNA strands comprises a sequence complementary to RNA of the target gene and wherein the sense strand sequence of the siNA comprises a sequence identical or substantially similar to the sequences of the target RNAs; and (b) introducing the siNA molecule into a cell under conditions suitable to modulate (e.g., inhibit) the expression of the target genes in the cell.

[0269] In another embodiment, the invention features a method for modulating the expression of a target gene within a cell comprising: (a) synthesizing a siNA molecule of the invention, which can be chemically-modified or unmodified, wherein one of the siNA strands comprises a sequence complementary to RNA of the target gene, wherein the sense strand sequence of the siNA comprises a sequence identical or substantially similar to the sequences of the target RNA; and (b) introducing the siNA molecule into a cell under conditions suitable to modulate (e.g., inhibit) the expression of the target gene in the cell.

[0270] In one embodiment, siNA molecules of the invention are used as reagents in ex vivo applications. For example, siNA reagents are introduced into tissue or cells that are transplanted into a subject for therapeutic effect. The cells and/or tissue can be derived from an organism or subject that later receives the explant, or can be derived from another organism or subject prior to transplantation. The siNA molecules can be used to modulate the expression of one or more genes in the cells or tissue, such that the cells or tissue obtain a desired phenotype or are able to perform a function when transplanted in vivo. In one embodiment, certain target cells (e.g., liver cells) from a patient are extracted. These extracted cells are contacted with siNAs targeting a specific nucleotide sequence within the cells under conditions suitable for uptake of the siNAs by these cells (e.g. using delivery reagents such as cationic lipids, liposomes and the like or using techniques such as electroporation to facilitate the delivery of siNAs into cells). The cells are then reintroduced back into the same patient or other patients.

[0271] In one embodiment, the invention features a method of modulating the expression of a target gene in a tissue explant (e.g., liver or any other organ, tissue or cell as can be transplanted from one organism to another or back to the same organism from which the organ, tissue or cell is derived) comprising: (a) synthesizing a siNA molecule of the invention, which can be chemically-modified, wherein one of the siNA strands comprises a sequence complementary to RNA of the target gene; and (b) introducing the siNA molecule into a cell of the tissue explant derived from a particular organism under conditions suitable to modulate (e.g., inhibit) the expression of the target gene in the tissue explant. In another embodiment, the method further comprises introducing the tissue explant back into the organism the tissue was derived from or into another organism under conditions suitable to modulate (e.g., inhibit) the expression of the target gene in that organism.

[0272] In one embodiment, the invention features a method of modulating the expression of a target gene in a tissue explant (e.g., liver or any other organ, tissue or cell as can be transplanted from one organism to another or back to the same organism from which the organ, tissue or cell is derived) comprising: (a) synthesizing a siNA molecule of the invention, which can be chemically-modified, wherein one of the siNA strands comprises a sequence complementary to RNA of the target gene and wherein the sense strand sequence of the siNA comprises a sequence identical or substantially similar to the sequence of the target RNA; and (b) introducing the siNA molecule into a cell of the tissue explant derived from a particular organism under conditions suitable to modulate (e.g., inhibit) the expression of the target gene in the tissue explant. In another embodiment, the method further comprises introducing the tissue explant back into the organism the tissue was derived from or into another organism under conditions suitable to modulate (e.g., inhibit) the expression of the target gene in that organism.

[0273] In another embodiment, the invention features a method of modulating the expression of more than one target gene in a tissue explant (e.g., liver or any other organ, tissue or cell as can be transplanted from one organism to another or back to the same organism from which the organ, tissue or cell is derived) comprising: (a) synthesizing siNA molecules of the invention, which can be chemically-modified, wherein one of the siNA strands comprises a sequence complementary to RNA of the target genes; and (b) introducing the siNA molecules into a cell of the tissue explant derived from a particular organism under conditions suitable to modulate (e.g., inhibit) the expression of the target genes in the tissue explant. In another embodiment, the method further comprises introducing the tissue explant back into the organism the tissue was derived from or into another organism under conditions suitable to modulate (e.g., inhibit) the expression of the target genes in that organism.

[0274] In one embodiment, the invention features a method of modulating the expression of a target gene in a subject or organism comprising: (a) synthesizing a siNA molecule of the invention, which can be chemically-modified, wherein one of the siNA strands comprises a sequence complementary to RNA of the target gene; and (b) introducing the siNA molecule into the subject or organism under conditions suitable to modulate (e.g., inhibit) the expression of the target gene in the subject or organism. The level of target protein or RNA can be determined using various methods well-known in the art.

[0275] In another embodiment, the invention features a method of modulating the expression of more than one target gene in a subject or organism comprising: (a) synthesizing siNA molecules of the invention, which can be chemically-modified, wherein one of the siNA strands comprises a sequence complementary to RNA of the target genes; and (b) introducing the siNA molecules into the subject or organism under conditions suitable to modulate (e.g., inhibit) the expression of the target genes in the subject or organism. The level of target protein or RNA can be determined as is known in the art.

[0276] In one embodiment, the invention features a method for modulating the expression of a target gene within a cell, comprising: (a) synthesizing a siNA molecule of the invention, which can be chemically-modified, wherein the siNA comprises a single stranded sequence having complementarity to RNA of the target gene; and (b) introducing the siNA molecule into a cell under conditions suitable to modulate (e.g., inhibit) the expression of the target gene in the cell.

[0277] In another embodiment, the invention features a method for modulating the expression of more than one target gene within a cell, comprising: (a) synthesizing siNA molecules of the invention, which can be chemically-modified, wherein the siNA comprises a single stranded sequence having complementarity to RNA of the target gene; and (b) contacting the cell in vitro or in vivo with the siNA molecule under conditions suitable to modulate (e.g., inhibit) the expression of the target genes in the cell.

[0278] In one embodiment, the invention features a method of modulating the expression of a target gene in a tissue explant ((e.g., any organ, tissue or cell as can be transplanted from one organism to another or back to the same organism from which the organ, tissue or cell is derived) comprising: (a) synthesizing a siNA molecule of the invention, which can be chemically-modified, wherein the siNA comprises a single stranded sequence having complementarity to RNA of the target gene; and (b) contacting a cell of the tissue explant derived from a particular subject or organism with the siNA molecule under conditions suitable to modulate (e.g., inhibit) the expression of the target gene in the tissue explant. In another embodiment, the method further comprises introducing the tissue explant back into the subject or organism the tissue was derived from or into another subject or organism under conditions suitable to modulate (e.g., inhibit) the expression of the target gene in that subject or organism.

[0279] In another embodiment, the invention features a method of modulating the expression of more than one target gene in a tissue explant (e.g., any organ, tissue or cell as can be transplanted from one organism to another or back to the same organism from which the organ, tissue or cell is derived) comprising: (a) synthesizing siNA molecules of the invention, which can be chemically-modified, wherein the siNA comprises a single stranded sequence having complementarity to RNA of the target gene; and (b) introducing the siNA molecules into a cell of the tissue explant derived from a particular subject or organism under conditions suitable to modulate (e.g., inhibit) the expression of the target genes in the tissue explant. In another embodiment, the method further comprises introducing the tissue explant back into the subject or organism the tissue was derived from or into another subject or organism under conditions suitable to modulate (e.g., inhibit) the expression of the target genes in that subject or organism.

[0280] In one embodiment, the invention features a method of modulating the expression of a target gene in a subject or organism comprising: (a) synthesizing a siNA molecule of the invention, which can be chemically-modified, wherein the siNA comprises a single stranded sequence having complementarity to RNA of the target gene; and (b) introducing the siNA molecule into the subject or organism under conditions suitable to modulate (e.g., inhibit) the expression of the target gene in the subject or organism.

[0281] In another embodiment, the invention features a method of modulating the expression of more than one target gene in a subject or organism comprising: (a) synthesizing siNA molecules of the invention, which can be chemically-modified, wherein the siNA comprises a single stranded sequence having complementarity to RNA of the target gene; and (b) introducing the siNA molecules into the subject or organism under conditions suitable to modulate (e.g., inhibit) the expression of the target genes in the subject or organism.

[0282] In one embodiment, the invention features a method of modulating the expression of a target gene in a subject or organism comprising contacting the subject or organism with a siNA molecule of the invention under conditions suitable to modulate (e.g., inhibit) the expression of the target gene in the subject or organism.

[0283] In one embodiment, the invention features a method for treating or preventing a disease, disorder, trait or condition related to gene expression or activity in a subject or organism comprising contacting the subject or organism with a siNA molecule of the invention under conditions suitable to modulate the expression of the target gene in the subject or organism. The reduction of gene expression and thus reduction in the level of the respective protein/RNA relieves, to some extent, the symptoms of the disease, disorder, trait or condition.

[0284] In one embodiment, the invention features a method for treating or preventing HCV infection in a subject or organism comprising contacting the subject or organism with a siNA molecule of the invention under conditions suitable to modulate the expression of the HCV target gene in the subject or organism whereby the treatment or prevention of HCV infection can be achieved. In one embodiment, the invention features contacting the subject or organism with a siNA molecule of the invention via local administration to relevant tissues or cells, such as liver cells and tissues. In one embodiment, the invention features contacting the subject or organism with a siNA molecule of the invention via systemic administration (such as via intravenous or subcutaneous administration of siNA) to relevant tissues or cells, such as tissues or cells involved in the maintenance or development of HCV infection in a subject or organism. The siNA molecule of the invention can be formulated or conjugated as described herein or otherwise known in the art to target appropriate tissues or cells in the subject or organism. The siNA molecule can be combined with other therapeutic treatments and modalities as are known in the art for the treatment of or prevention of HCV infection in a subject or organism.

[0285] In one embodiment, the invention features a method for treating or preventing a liver failure or condition in a subject or organism comprising contacting the subject or organism with a siNA molecule of the invention under conditions suitable to modulate the expression of the HCV target gene in the subject or organism whereby the treatment or prevention of the liver failure or condition can be achieved. In one embodiment, the invention features contacting the subject or organism with a siNA molecule of the invention via local administration to relevant tissues or cells, such as liver cells and tissues involved in liver failure. In one embodiment, the invention features contacting the subject or organism with a siNA molecule of the invention via systemic administration (such as via intravenous or subcutaneous administration of siNA) to relevant tissues or cells, such as tissues or cells involved in the maintenance or development of the liver failure or condition in a subject or organism. The siNA molecule of the invention can be formulated or conjugated as described herein or otherwise known in the art to target appropriate tissues or cells in the subject or organism. The siNA molecule can be combined with other therapeutic treatments and modalities as are known in the art for the treatment of or prevention of liver failures, traits, disorders, or conditions in a subject or organism.

[0286] In one embodiment, the invention features a method for treating or preventing hepatocellular carcinoma in a subject or organism comprising contacting the subject or organism with a siNA molecule of the invention under conditions suitable to modulate the expression of the HCV target gene in the subject or organism whereby the treatment or prevention of hepatocellular carcinoma can be achieved. In one embodiment, the invention features contacting the subject or organism with a siNA molecule of the invention via local administration to relevant tissues or cells, such as liver cells and tissues involved in hepatocellular carcinoma. In one embodiment, the invention features contacting the subject or organism with a siNA molecule of the invention via systemic administration (such as via intravenous or subcutaneous administration of siNA) to relevant tissues or cells, such as tissues or cells involved in the maintenance or development of hepatocellular carcinoma in a subject or organism. The siNA molecule of the invention can be formulated or conjugated as described herein or otherwise known in the art to target appropriate tissues or cells in the subject or organism. The siNA molecule can be combined with other therapeutic treatments and modalities as are known in the art for the treatment of or prevention of hepatocellular carcinoma in a subject or organism.

[0287] In one embodiment, the invention features a method for treating or preventing an cirrhosis, disorder, trait or condition in a subject or organism comprising contacting the subject or organism with a siNA molecule of the invention under conditions suitable to modulate the expression of the HCV target gene in the subject or organism whereby the treatment or prevention of the cirrhosis, disorder, trait or condition can be achieved. In one embodiment, the invention features contacting the subject or organism with a siNA molecule of the invention via local administration to relevant tissues or cells, such as cells and tissues involved in the cirrhosis, disorder, trait or condition. In one embodiment, the invention features contacting the subject or organism with a siNA molecule of the invention via systemic administration (such as via intravenous or subcutaneous administration of siNA) to relevant tissues or cells, such as tissues or cells involved in the maintenance or development of the cirrhosis, disorder, trait or condition in a subject or organism. The siNA molecule of the invention can be formulated or conjugated as described herein or otherwise known in the art to target appropriate tissues or cells in the subject or organism. The siNA molecule can be combined with other therapeutic treatments and modalities as are known in the art for the treatment of or prevention of cirrhosis, traits, disorders, or conditions in a subject or organism.

[0288] In one embodiment, the invention features a method for treating or preventing HCV infection in a subject or organism comprising contacting the subject or organism with a siNA molecule of the invention under conditions suitable to modulate (e.g., inhibit) the expression of an inhibitor of HCV gene expression in the subject or organism.

[0289] In one embodiment, the invention features a method for treating or preventing liver failure in a subject or organism comprising contacting the subject or organism with a siNA molecule of the invention under conditions suitable to modulate (e.g., inhibit) the expression of an inhibitor of HCV gene expression in the subject or organism.

[0290] In one embodiment, the invention features a method for treating or preventing hepatocellular carcinoma in a subject or organism comprising contacting the subject or organism with a siNA molecule of the invention under conditions suitable to modulate (e.g., inhibit) the expression of an inhibitor of HCV gene expression in the subject or organism.

[0291] In one embodiment, the invention features a method for treating or preventing cirrhosis in a subject or organism comprising contacting the subject or organism with a siNA molecule of the invention under conditions suitable to modulate (e.g., inhibit) the expression of an inhibitor of HCV gene expression in the subject or organism.

[0292] In one embodiment, the invention features a method for treating or preventing Hepatitis C Virus (HCV) infection in a subject, comprising administering to the subject PEG Interferon in combination with a siNA molecule of the invention; wherein the PEG Interferon and the siNA molecule are administered under conditions suitable for reducing or inhibiting the level of Hepatitis C Virus (HCV) in the subject compared to a subject not treated with the PEG Interferon and the siNA molecule. In one embodiment, a siNA molecule of the invention is formulated as a composition described in U.S. Provisional patent application No. 60/678,531 and in related U.S. Provisional patent application No. 60/703,946, filed Jul. 29, 2005, and U.S. Provisional patent application No. 60/737,024, filed Nov. 15, 2005 (Vargeese et al.), all of which are incorporated by reference herein in their entirety. Such siNA formulations are generally referred to as “lipid nucleic acid particles” (LNP).

[0293] In one embodiment, the invention features a method for treating or preventing Hepatitis C Virus (HCV) infection in a subject, comprising administering to the subject ribavirin in combination with a siNA molecule of the invention; wherein the ribavirin and the siNA are administered under conditions suitable for reducing or inhibiting the level of Hepatitis C Virus (HCV) in the subject compared to a subject not treated with the ribavirin and the siNA molecule. In one embodiment, the siNA molecule or double stranded nucleic acid molecule of the invention is formulated as a composition described in U.S. Provisional patent application No. 60/678,531 and in related U.S. Provisional patent application No. 60/703,946, filed Jul. 29, 2005, and U.S. Provisional patent application No. 60/737,024, filed Nov. 15, 2005 (Vargeese et al.).

[0294] In one embodiment, the invention features a method for treating or preventing Hepatitis C Virus (HCV) infection in a subject, comprising administering to the subject PEG Interferon and ribavirin in combination with a siNA molecule of the invention; wherein the PEG Interferon and ribavirin and the siNA molecule are administered under conditions suitable for reducing or inhibiting the level of Hepatitis C Virus (HCV) in the subject compared to a subject not treated with the PEG Interferon and ribavirin and the siNA molecule. In one embodiment, the siNA molecule or double stranded nucleic acid molecule of the invention is formulated as a composition described in U.S. Provisional patent application No. 60/678,531 and in related U.S. Provisional patent application No. 60/703,946, filed Jul. 29, 2005, and U.S. Provisional patent application No. 60/737,024, filed Nov. 15, 2005 (Vargeese et al.).

[0295] In one embodiment, the invention features a method for treating or preventing Hepatitis C Virus (HCV) infection in a subject, comprising administering to the subject PEG Interferon in combination with a chemically synthesized double stranded nucleic acid molecule; wherein (a) the double stranded nucleic acid molecule comprises a sense strand and an antisense strand; (b) each strand of the double stranded nucleic acid molecule is 15 to 28 nucleotides in length; (c) at least 15 nucleotides of the sense strand are complementary to the antisense strand(d) the antisense strand of the double stranded nucleic acid molecule has complementarity to a Hepatitis C Virus (HCV) HCV target RNA; and wherein the PEG Interferon and the double stranded nucleic acid molecule are administered under conditions suitable for reducing or inhibiting the level of Hepatitis C Virus (HCV) in the subject compared to a subject not treated with the PEG Interferon and the double stranded nucleic acid molecule. In one embodiment, the siNA molecule or double stranded nucleic acid molecule of the invention is formulated as a composition described in U.S. Provisional patent application No. 60/678,531 and in related U.S. Provisional patent application No. 60/703,946, filed Jul. 29, 2005, and U.S. Provisional patent application No. 60/737,024, filed Nov. 15, 2005 (Vargeese et al.).

[0296] In one embodiment, the invention features a method for treating or preventing Hepatitis C Virus (HCV) infection in a subject, comprising administering to the subject ribavirin in combination with a chemically synthesized double stranded nucleic acid molecule; wherein (a) the double stranded nucleic acid molecule comprises a sense strand and an antisense strand; (b) each strand of the double stranded nucleic acid molecule is 15 to 28 nucleotides in length; (c) at least 15 nucleotides of the sense strand are complementary to the antisense strand(d) the antisense strand of the double stranded nucleic acid molecule has complementarity to a Hepatitis C Virus (HCV) HCV target RNA; and wherein the ribavirin and the double stranded nucleic acid molecule are administered under conditions suitable for reducing or inhibiting the level of Hepatitis C Virus (HCV) in the subject compared to a subject not treated with the ribavirin and the double stranded nucleic acid molecule. In one embodiment, the siNA molecule or double stranded nucleic acid molecule of the invention is formulated as a composition described in U.S. Provisional patent application No. 60/678,531 and in related U.S. Provisional patent application No. 60/703,946, filed Jul. 29, 2005, and U.S. Provisional patent application No. 60/737,024, filed Nov. 15, 2005 (Vargeese et al.).

[0297] In one embodiment, the invention features a method for treating or preventing Hepatitis C Virus (HCV) infection in a subject, comprising administering to the subject PEG Interferon and ribavirin in combination with a chemically synthesized double stranded nucleic acid molecule; wherein (a) the double stranded nucleic acid molecule comprises a sense strand and an antisense strand; (b) each strand of the double stranded nucleic acid molecule is 15 to 28 nucleotides in length; (c) at least 15 nucleotides of the sense strand are complementary to the antisense strand(d) the antisense strand of the double stranded nucleic acid molecule has complementarity to a Hepatitis C Virus (HCV) HCV target RNA; and wherein the PEG Interferon and ribavirin and the double stranded nucleic acid molecule are administered under conditions suitable for reducing or inhibiting the level of Hepatitis C Virus (HCV) in the subject compared to a subject not treated with the PEG Interferon and ribavirin and the double stranded nucleic acid molecule. In one embodiment, the siNA molecule or double stranded nucleic acid molecule of the invention is formulated as a composition described in U.S. Provisional patent application No. 60/678,531 and in related U.S. Provisional patent application No. 60/703,946, filed Jul. 29, 2005, and U.S. Provisional patent application No. 60/737,024, filed Nov. 15, 2005 (Vargeese et al.).

[0298] In one embodiment, the invention features a method for treating or preventing Hepatitis C Virus (HCV) infection in a subject, comprising administering to the subject PEG Interferon in combination with a chemically synthesized double stranded nucleic acid molecule; wherein (a) the double stranded nucleic acid molecule comprises a sense strand and an antisense strand; (b) each strand of the double stranded nucleic acid molecule is 15 to 28 nucleotides in length; (c) at least 15 nucleotides of the sense strand are complementary to the antisense strand(d) the antisense strand of the double stranded nucleic acid molecule has complementarity to a Hepatitis C Virus (HCV) HCV target RNA; (e) at least 20% of the internal nucleotides of each strand of the double stranded nucleic acid molecule are modified nucleosides having a chemical modification; and (f) at least two of the chemical modifications are different from each other, and wherein the PEG Interferon and the double stranded nucleic acid molecule are administered under conditions suitable for reducing or inhibiting the level of Hepatitis C Virus (HCV) in the subject compared to a subject not treated with the PEG Interferon and the double stranded nucleic acid molecule. In one embodiment, the siNA molecule or double stranded nucleic acid molecule of the invention is formulated as a composition described in U.S. Provisional patent application No. 60/678,531 and in related U.S. Provisional patent application No. 60/703,946, filed Jul. 29, 2005, and U.S. Provisional patent application No. 60/737,024, filed Nov. 15, 2005 (Vargeese et al.).

[0299] In one embodiment, the invention features a method for treating or preventing Hepatitis C Virus (HCV) infection in a subject, comprising administering to the subject ribavirin in combination with a chemically synthesized double stranded nucleic acid molecule; wherein (a) the double stranded nucleic acid molecule comprises a sense strand and an antisense strand; (b) each strand of the double stranded nucleic acid molecule is 15 to 28 nucleotides in length; (c) at least 15 nucleotides of the sense strand are complementary to the antisense strand(d) the antisense strand of the double stranded nucleic acid molecule has complementarity to a Hepatitis C Virus (HCV) HCV target RNA; (e) at least 20% of the internal nucleotides of each strand of the double stranded nucleic acid molecule are modified nucleosides having a chemical modification; and (f) at least two of the chemical modifications are different from each other, and wherein the ribavirin and the double stranded nucleic acid molecule are administered under conditions suitable for reducing or inhibiting the level of Hepatitis C Virus (HCV) in the subject compared to a subject not treated with the ribavirin and the double stranded nucleic acid molecule. In one embodiment, the siNA molecule or double stranded nucleic acid molecule of the invention is formulated as a composition described in U.S. Provisional patent application No. 60/678,531 and in related U.S. Provisional patent application No. 60/703,946, filed Jul. 29, 2005, and U.S. Provisional patent application No. 60/737,024, filed Nov. 15, 2005 (Vargeese et al.).

[0300] In one embodiment, the invention features a method for treating or preventing Hepatitis C Virus (HCV) infection in a subject, comprising administering to the subject PEG Interferon and ribavirin in combination with a chemically synthesized double stranded nucleic acid molecule; wherein (a) the double stranded nucleic acid molecule comprises a sense strand and an antisense strand; (b) each strand of the double stranded nucleic acid molecule is 15 to 28 nucleotides in length; (c) at least 15 nucleotides of the sense strand are complementary to the antisense strand(d) the antisense strand of the double stranded nucleic acid molecule has complementarity to a Hepatitis C Virus (HCV) HCV target RNA; (e) at least 20% of the internal nucleotides of each strand of the double stranded nucleic acid molecule are modified nucleosides having a chemical modification; and (f) at least two of the chemical modifications are different from each other, and wherein the PEG Interferon and ribavirin and the double stranded nucleic acid molecule are administered under conditions suitable for reducing or inhibiting the level of Hepatitis C Virus (HCV) in the subject compared to a subject not treated with the PEG Interferon and ribavirin and the double stranded nucleic acid molecule. In one embodiment, the siNA molecule or double stranded nucleic acid molecule of the invention is formulated as a composition described in U.S. Provisional patent application No. 60/678,531 and in related U.S. Provisional patent application No. 60/703,946, filed Jul. 29, 2005, and U.S. Provisional patent application No. 60/737,024, filed Nov. 15, 2005 (Vargeese et al.).

[0301] In one embodiment, the invention features a method for treating or preventing Hepatitis C Virus (HCV) infection in a subject, comprising administering to the subject PEG Interferon in combination with a chemically synthesized double stranded nucleic acid molecule; wherein (a) the double stranded nucleic acid molecule comprises a sense strand and an antisense strand; (b) each strand of the double stranded nucleic acid molecule is 15 to 28 nucleotides in length; (c) at least 15 nucleotides of the sense strand are complementary to the antisense strand(d) the antisense strand of the double stranded nucleic acid molecule has complementarity to a Hepatitis C Virus (HCV) HCV target RNA; (e) at least 20% of the internal nucleotides of each strand of the double stranded nucleic acid molecule are modified nucleosides having a sugar modification; and (f) at least two of the sugar modifications are different from each other, and wherein the PEG Interferon and the double stranded nucleic acid molecule are administered under conditions suitable for reducing or inhibiting the level of Hepatitis C Virus (HCV) in the subject compared to a subject not treated with the PEG Interferon and the double stranded nucleic acid molecule. In one embodiment, the siNA molecule or double stranded nucleic acid molecule of the invention is formulated as a composition described in U.S. Provisional patent application No. 60/678,531 and in related U.S. Provisional patent application No. 60/703,946, filed Jul. 29, 2005, and U.S. Provisional patent application No. 60/737,024, filed Nov. 15, 2005 (Vargeese et al.).

[0302] In one embodiment, the invention features a method for treating or preventing Hepatitis C Virus (HCV) infection in a subject, comprising administering to the subject ribavirin in combination with a chemically synthesized double stranded nucleic acid molecule; wherein (a) the double stranded nucleic acid molecule comprises a sense strand and an antisense strand; (b) each strand of the double stranded nucleic acid molecule is 15 to 28 nucleotides in length; (c) at least 15 nucleotides of the sense strand are complementary to the antisense strand(d) the antisense strand of the double stranded nucleic acid molecule has complementarity to a Hepatitis C Virus (HCV) HCV target RNA; (e) at least 20% of the internal nucleotides of each strand of the double stranded nucleic acid molecule are modified nucleosides having a sugar modification; and (f) at least two of the sugar modifications are different from each other, and wherein the ribavirin and the double stranded nucleic acid molecule are administered under conditions suitable for reducing or inhibiting the level of Hepatitis C Virus (HCV) in the subject compared to a subject not treated with the ribavirin and the double stranded nucleic acid molecule. In one embodiment, the siNA molecule or double stranded nucleic acid molecule of the invention is formulated as a composition described in U.S. Provisional patent application No. 60/678,531 and in related U.S. Provisional patent application No. 60/703,946, filed Jul. 29, 2005, and U.S. Provisional patent application No. 60/737,024, filed Nov. 15, 2005 (Vargeese et al.).

[0303] In one embodiment, the invention features a method for treating or preventing Hepatitis C Virus (HCV) infection in a subject, comprising administering to the subject PEG Interferon and ribavirin in combination with a chemically synthesized double stranded nucleic acid molecule; wherein (a) the double stranded nucleic acid molecule comprises a sense strand and an antisense strand; (b) each strand of the double stranded nucleic acid molecule is 15 to 28 nucleotides in length; (c) at least 15 nucleotides of the sense strand are complementary to the antisense strand(d) the antisense strand of the double stranded nucleic acid molecule has complementarity to a Hepatitis C Virus (HCV) HCV target RNA; (e) at least 20% of the internal nucleotides of each strand of the double stranded nucleic acid molecule are modified nucleosides having a sugar modification; and (f) at least two of the sugar modifications are different from each other, and wherein the PEG Interferon and ribavirin and the double stranded nucleic acid molecule are administered under conditions suitable for reducing or inhibiting the level of Hepatitis C Virus (HCV) in the subject compared to a subject not treated with the PEG Interferon and ribavirin and the double stranded nucleic acid molecule. In one embodiment, the siNA molecule or double stranded nucleic acid molecule of the invention is formulated as a composition described in U.S. Provisional patent application No. 60/678,531 and in related U.S. Provisional patent application No. 60/703,946, filed Jul. 29, 2005, and U.S. Provisional patent application No. 60/737,024, filed Nov. 15, 2005 (Vargeese et al.).

[0304] In one embodiment, the invention features a method for treating or preventing a neurologic or neurodegenerative disease, disorder, trait or condition in a subject or organism comprising contacting the subject or organism with a siNA molecule of the invention under conditions suitable to modulate the expression of the HCV target gene in the subject or organism whereby the treatment or prevention of the neurologic or neurodegenerative disease, disorder, trait or condition can be achieved. In one embodiment, the invention features contacting the subject or organism with a siNA molecule of the invention via local administration to relevant tissues or cells, such as cells and tissues involved in the neurologic or neurodegenerative disease, disorder, trait or condition. In one embodiment, the invention features contacting the subject or organism with a siNA molecule of the invention via systemic administration (such as via intravenous or subcutaneous administration of siNA) to relevant tissues or cells, such as tissues or cells involved in the maintenance or development of the neurologic or neurodegenerative disease, disorder, trait or condition in a subject or organism. The siNA molecule of the invention can be formulated or conjugated as described herein or otherwise known in the art to target appropriate tissues or cells in the subject or organism. The siNA molecule can be combined with other therapeutic treatments and modalities as are known in the art for the treatment of or prevention of neurologic or neurodegenerative diseases, traits, disorders, or conditions in a subject or organism.

[0305] In one embodiment, the invention features a method for treating or preventing a metabolic disease, disorder, trait or condition in a subject or organism comprising contacting the subject or organism with a siNA molecule of the invention under conditions suitable to modulate the expression of the HCV target gene in the subject or organism whereby the treatment or prevention of the metabolic disease, disorder, trait or condition can be achieved. In one embodiment, the invention features contacting the subject or organism with a siNA molecule of the invention via local administration to relevant tissues or cells, such as cells and tissues involved in the metabolic disease, disorder, trait or condition. In one embodiment, the invention features contacting the subject or organism with a siNA molecule of the invention via systemic administration (such as via intravenous or subcutaneous administration of siNA) to relevant tissues or cells, such as tissues or cells involved in the maintenance or development of the metabolic disease, disorder, trait or condition in a subject or organism. The siNA molecule of the invention can be formulated or conjugated as described herein or otherwise known in the art to target appropriate tissues or cells in the subject or organism. The siNA molecule can be combined with other therapeutic treatments and modalities as are known in the art for the treatment of or prevention of metabolic diseases, traits, disorders, or conditions in a subject or organism.

[0306] In one embodiment, the invention features a composition comprising PEG Interferon and one or more double stranded nucleic acid molecules or siNA molecules of the invention in a pharmaceutically acceptable carrier or diluent. In another embodiment, the invention features a composition comprising PEG Interferon, ribavirin, Vertex VX-950, Actilon (CPG 10101), and/or Isatoribine (TLR-7 agonist) and one or more double stranded nucleic acid molecules or siNA molecules of the invention in a pharmaceutically acceptable carrier or diluent.

[0307] In one embodiment, a method of treatment of the invention features administration of a double stranded nucleic acid molecule of the invention in combination with one or more other therapeutic modalities, including Interferon (e.g., Interferon-alpha, or PEG interferon such as PEG-Intron, Rebetol, Rebetron, or Pegasys), ribavirin, Vertex VX-950, Actilon (CPG 10101), or Isatoribine (TLR-7 agonist). In another embodiment, such combination therapies can be utilized in any of the embodiments herein.

[0308] In one embodiment, the siNA molecule or double stranded nucleic acid molecule of the invention is formulated as a composition described in U.S. Provisional patent application No. 60/678,531 and in related U.S. Provisional patent application No. 60/703,946, filed Jul. 29, 2005, U.S. Provisional patent application No. 60/737,024, filed Nov. 15, 2005, and U.S. Ser. No. 11/353,630, filed Feb. 14, 2006 (Vargeese et al.).

[0309] In any of the methods herein for modulating the expression of one or more targets or for treating or preventing diseases, traits, conditions, or phenotypes in a cell, subject, or organism, the siNA molecule of the invention modulates expression of one or more targets via RNA interference. In one embodiment, the RNA interference is RISC mediated cleavage of the target (e.g., siRNA mediated RNA interference). In one embodiment, the RNA interference is translational inhibition of the target (e.g., miRNA mediated RNA interference). In one embodiment, the RNA interference is transcriptional inhibition of the target (e.g., siRNA mediated transcriptional silencing). In one embodiment, the RNA interference takes place in the cytoplasm. In one embodiment, the RNA interference takes place in the nucleus.

[0310] In any of the methods of treatment of the invention, the siNA can be administered to the subject as a course of treatment, for example administration at various time intervals, such as once per day over the course of treatment, once every two days over the course of treatment, once every three days over the course of treatment, once every four days over the course of treatment, once every five days over the course of treatment, once every six days over the course of treatment, once per week over the course of treatment, once every other week over the course of treatment, once per month over the course of treatment, etc. In one embodiment, the course of treatment is once every 1, 2, 3, 4, 5, 6, 7, 8, 9, or 10 weeks. In one embodiment, the course of treatment is from about one to about 52 weeks or longer (e.g., indefinitely). In one embodiment, the course of treatment is from about one to about 48 months or longer (e.g., indefinitely).

[0311] In one embodiment, a course of treatment involves an initial course of treatment, such as once every 1, 2, 3, 4, 5, 6, 7, 8, 9, 10 or more weeks for a fixed interval (e.g., 1×, 2×, 3×, 4×, 5×, 6×, 7×, 8×, 9×, 10× or more) followed by a maintenance course of treatment, such as once every 4, 6, 8, 10, 15, 20, 25, 30, 35, 40, or more weeks for an additional fixed interval (e.g., 1×, 2×, 3×, 4×, 5×, 6×, 7×, 8×, 9×, 10× or more).

[0312] In any of the methods of treatment of the invention, the siNA can be administered to the subject systemically as described herein or otherwise known in the art, either alone as a monotherapy or in combination with additional therapies described herein or as are known in the art. Systemic administration can include, for example, pulmonary (inhalation, nebulization etc.) intravenous, subcutaneous, intramuscular, catheterization, nasopharangeal, transdermal, or oral/gastrointestinal administration as is generally known in the art.

[0313] In one embodiment, in any of the methods of treatment or prevention of the invention, the siNA can be administered to the subject locally or to local tissues as described herein or otherwise known in the art, either alone as a monotherapy or in combination with additional therapies as are known in the art. Local administration can include, for example, inhalation, nebulization, catheterization, implantation, direct injection, dermal/transdermal application, stenting, ear/eye drops, or portal vein administration to relevant tissues, or any other local administration technique, method or procedure, as is generally known in the art.

[0314] In one embodiment, the invention features a method for administering siNA molecules and compositions of the invention to the inner ear, comprising, contacting the siNA with inner ear cells, tissues, or structures, under conditions suitable for the administration. In one embodiment, the administration comprises methods and devices as described in U.S. Pat. Nos. 5,421,818, 5,476,446, 5,474,529, 6,045,528, 6,440,102, 6,685,697, 6,120,484; and 5,572,594; all incorporated by reference herein and the teachings of Silverstein, 1999, Ear Nose Throat J., 78, 595-8, 600; and Jackson and Silverstein, 2002, Otolaryngol Clin North Am., 35, 639-53, and adapted for use the siNA molecules of the invention.

[0315] In another embodiment, the invention features a method of modulating the expression of more than one target gene in a subject or organism comprising contacting the subject or organism with one or more siNA molecules of the invention under conditions suitable to modulate (e.g., inhibit) the expression of the target genes in the subject or organism.

[0316] The siNA molecules of the invention can be designed to down regulate or inhibit target gene expression through RNAi targeting of a variety of nucleic acid molecules. In one embodiment, the siNA molecules of the invention are used to target various DNA corresponding to a target gene, for example via heterochromatic silencing or transcriptional inhibition. In one embodiment, the siNA molecules of the invention are used to target various RNAs corresponding to a target gene, for example via RNA target cleavage or translational inhibition. Non-limiting examples of such RNAs include messenger RNA (mRNA), non-coding RNA (ncRNA) or regulatory elements (see for example Mattick, 2005, Science, 309, 1527-1528 and Claverie, 2005, Science, 309, 1529-1530) which includes miRNA and other small RNAs, alternate RNA splice variants of target gene(s), post-transcriptionally modified RNA of target gene(s), pre-mRNA of target gene(s), and/or RNA templates. If alternate splicing produces a family of transcripts that are distinguished by usage of appropriate exons, the instant invention can be used to inhibit gene expression through the appropriate exons to specifically inhibit or to distinguish among the functions of gene family members. For example, a protein that contains an alternatively spliced transmembrane domain can be expressed in both membrane bound and secreted forms. Use of the invention to target the exon containing the transmembrane domain can be used to determine the functional consequences of pharmaceutical targeting of the membrane bound as opposed to the secreted form of the protein. Non-limiting examples of applications of the invention relating to targeting these RNA molecules include therapeutic pharmaceutical applications, cosmetic applications, veterinary applications, pharmaceutical discovery applications, molecular diagnostic and gene function applications, and gene mapping, for example using single nucleotide polymorphism mapping with siNA molecules of the invention. Such applications can be implemented using known gene sequences or from partial sequences available from an expressed sequence tag (EST).

[0317] In another embodiment, the siNA molecules of the invention are used to target conserved sequences corresponding to a gene family or gene families such as HCV family genes (e.g., all known HCV strains, groups of related HCV strains, or groups of divergent HCV strains). As such, siNA molecules targeting multiple HCV targets can provide increased therapeutic effect. In addition, siNA can be used to characterize pathways of gene function in a variety of applications. For example, the present invention can be used to inhibit the activity of target gene(s) in a pathway to determine the function of uncharacterized gene(s) in gene function analysis, mRNA function analysis, or translational analysis. The invention can be used to determine potential target gene pathways involved in various diseases and conditions toward pharmaceutical development. The invention can be used to understand pathways of gene expression involved in, for example proliferative diseases, disorders and conditions.

[0318] In one embodiment, siNA molecules can be used to characterize pathways of gene function in a variety of applications. For example, the present invention can be used to inhibit the activity of target gene(s) in a pathway to determine the function of uncharacterized gene(s) in gene function analysis, mRNA function analysis, or translational analysis. The invention can be used to determine potential target gene pathways involved in various diseases and conditions toward pharmaceutical development. The invention can be used to understand pathways of gene expression involved in, for example diseases, disorders, traits and conditions herein or otherwise known in the art.

[0319] In one embodiment, siNA molecule(s) and/or methods of the invention are used to down regulate the expression of gene(s) that encode RNA referred to by Genbank Accession, for example, target genes encoding RNA sequence(s) referred to herein by Genbank Accession number, for example, Genbank Accession Nos. shown herein (e.g. in Table I) and U.S. Provisional Patent Application No. 60/363,124, U.S. Ser. No. 10/923,536 and PCT/US03/05028, all incorporated by reference herein.

[0320] In one embodiment, the invention features a method comprising: (a) generating a library of siNA constructs having a predetermined complexity; and (b) assaying the siNA constructs of (a) above, under conditions suitable to determine RNAi target sites within the target RNA sequence. In one embodiment, the siNA molecules of (a) have strands of a fixed length, for example, about 23 nucleotides in length. In another embodiment, the siNA molecules of (a) are of differing length, for example having strands of about 15 to about 30 (e.g., about 15, 16, 17, 18, 19, 20, 21, 22, 23, 24, 25, 26, 27, 28, 29, or 30) nucleotides in length. In one embodiment, the assay can comprise a reconstituted in vitro siNA assay as described herein. In another embodiment, the assay can comprise a cell culture system in which target RNA is expressed. In another embodiment, fragments of target RNA are analyzed for detectable levels of cleavage, for example by gel electrophoresis, northern blot analysis, or RNAse protection assays, to determine the most suitable target site(s) within the target RNA sequence. The target RNA sequence can be obtained as is known in the art, for example, by cloning and/or transcription for in vitro systems, and by cellular expression in in vivo systems.

[0321] In one embodiment, the invention features a method comprising: (a) generating a randomized library of siNA constructs having a predetermined complexity, such as of 4^{N}, where N represents the number of base paired nucleotides in each of the siNA construct strands (eg. for a siNA construct having 21 nucleotide sense and antisense strands with 19 base pairs, the complexity would be 4¹⁹); and (b) assaying the siNA constructs of (a) above, under conditions suitable to determine RNAi target sites within the target target RNA sequence. In another embodiment, the siNA molecules of (a) have strands of a fixed length, for example about 23 nucleotides in length. In yet another embodiment, the siNA molecules of (a) are of differing length, for example having strands of about 15 to about 30 (e.g., about 15, 16, 17, 18, 19, 20, 21, 22, 23, 24, 25, 26, 27, 28, 29, or 30) nucleotides in length. In one embodiment, the assay can comprise a reconstituted in vitro siNA assay as described in Example 6 herein. In another embodiment, the assay can comprise a cell culture system in which target RNA is expressed. In another embodiment, fragments of target RNA are analyzed for detectable levels of cleavage, for example, by gel electrophoresis, northern blot analysis, or RNAse protection assays, to determine the most suitable target site(s) within the target target RNA sequence. The target target RNA sequence can be obtained as is known in the art, for example, by cloning and/or transcription for in vitro systems, and by cellular expression in in vivo systems.

[0322] In another embodiment, the invention features a method comprising: (a) analyzing the sequence of a RNA target encoded by a target gene; (b) synthesizing one or more sets of siNA molecules having sequence complementary to one or more regions of the RNA of (a); and (c) assaying the siNA molecules of (b) under conditions suitable to determine RNAi targets within the target RNA sequence. In one embodiment, the siNA molecules of (b) have strands of a fixed length, for example about 23 nucleotides in length. In another embodiment, the siNA molecules of (b) are of differing length, for example having strands of about 15 to about 30 (e.g., about 15, 16, 17, 18, 19, 20, 21, 22, 23, 24, 25, 26, 27, 28, 29, or 30) nucleotides in length. In one embodiment, the assay can comprise a reconstituted in vitro siNA assay as described herein. In another embodiment, the assay can comprise a cell culture system in which target RNA is expressed. Fragments of target RNA are analyzed for detectable levels of cleavage, for example by gel electrophoresis, northern blot analysis, or RNAse protection assays, to determine the most suitable target site(s) within the target RNA sequence. The target RNA sequence can be obtained as is known in the art, for example, by cloning and/or transcription for in vitro systems, and by expression in in vivo systems.

[0323] By “target site” is meant a sequence within a target RNA that is “targeted” for cleavage mediated by a siNA construct which contains sequences within its antisense region that are complementary to the target sequence.

[0324] By “detectable level of cleavage” is meant cleavage of target RNA (and formation of cleaved product RNAs) to an extent sufficient to discern cleavage products above the background of RNAs produced by random degradation of the target RNA. Production of cleavage products from 1-5% of the target RNA is sufficient to detect above the background for most methods of detection.

[0325] In one embodiment, the invention features a composition comprising a siNA molecule of the invention, which can be chemically-modified, in a pharmaceutically acceptable carrier or diluent. In another embodiment, the invention features a pharmaceutical composition comprising siNA molecules of the invention, which can be chemically-modified, targeting one or more genes in a pharmaceutically acceptable carrier or diluent. In another embodiment, the invention features a method for diagnosing a disease, trait, or condition in a subject comprising administering to the subject a composition of the invention under conditions suitable for the diagnosis of the disease, trait, or condition in the subject. In another embodiment, the invention features a method for treating or preventing a disease, trait, or condition, such as metabolic and/or cardiovascular diseases, traits, conditions, or disorders in a subject, comprising administering to the subject a composition of the invention under conditions suitable for the treatment or prevention of the disease, trait, or condition in the subject, alone or in conjunction with one or more other therapeutic compounds.

[0326] In another embodiment, the invention features a method for validating a target gene target, comprising: (a) synthesizing a siNA molecule of the invention, which can be chemically-modified, wherein one of the siNA strands includes a sequence complementary to RNA of a target gene; (b) introducing the siNA molecule into a cell, tissue, subject, or organism under conditions suitable for modulating expression of the target gene in the cell, tissue, subject, or organism; and (c) determining the function of the gene by assaying for any phenotypic change in the cell, tissue, subject, or organism.

[0327] In another embodiment, the invention features a method for validating a target comprising: (a) synthesizing a siNA molecule of the invention, which can be chemically-modified, wherein one of the siNA strands includes a sequence complementary to RNA of a target gene; (b) introducing the siNA molecule into a biological system under conditions suitable for modulating expression of the target gene in the biological system; and (c) determining the function of the gene by assaying for any phenotypic change in the biological system.

[0328] By “biological system” is meant, material, in a purified or unpurified form, from biological sources, including but not limited to human or animal, wherein the system comprises the components required for RNAi activity. The term “biological system” includes, for example, a cell, tissue, subject, or organism, or extract thereof. The term biological system also includes reconstituted RNAi systems that can be used in an in vitro setting.

[0329] By “phenotypic change” is meant any detectable change to a cell that occurs in response to contact or treatment with a nucleic acid molecule of the invention (e.g., siNA). Such detectable changes include, but are not limited to, changes in shape, size, proliferation, motility, protein expression or RNA expression or other physical or chemical changes as can be assayed by methods known in the art. The detectable change can also include expression of reporter genes/molecules such as Green Florescent Protein (GFP) or various tags that are used to identify an expressed protein or any other cellular component that can be assayed.

[0330] In one embodiment, the invention features a kit containing a siNA molecule of the invention, which can be chemically-modified, that can be used to modulate the expression of a target gene in a biological system, including, for example, in a cell, tissue, subject, or organism. In another embodiment, the invention features a kit containing more than one siNA molecule of the invention, which can be chemically-modified, that can be used to modulate the expression of more than one target gene in a biological system, including, for example, in a cell, tissue, subject, or organism.

[0331] In one embodiment, the invention features a cell containing one or more siNA molecules of the invention, which can be chemically-modified. In another embodiment, the cell containing a siNA molecule of the invention is a mammalian cell. In yet another embodiment, the cell containing a siNA molecule of the invention is a human cell.

[0332] In one embodiment, the synthesis of a siNA molecule of the invention, which can be chemically-modified, comprises: (a) synthesis of two complementary strands of the siNA molecule; (b) annealing the two complementary strands together under conditions suitable to obtain a double-stranded siNA molecule. In another embodiment, synthesis of the two complementary strands of the siNA molecule is by solid phase oligonucleotide synthesis. In yet another embodiment, synthesis of the two complementary strands of the siNA molecule is by solid phase tandem oligonucleotide synthesis.

[0333] In one embodiment, the invention features a method for synthesizing a siNA duplex molecule comprising: (a) synthesizing a first oligonucleotide sequence strand of the siNA molecule, wherein the first oligonucleotide sequence strand comprises a cleavable linker molecule that can be used as a scaffold for the synthesis of the second oligonucleotide sequence strand of the siNA; (b) synthesizing the second oligonucleotide sequence strand of siNA on the scaffold of the first oligonucleotide sequence strand, wherein the second oligonucleotide sequence strand further comprises a chemical moiety than can be used to purify the siNA duplex; (c) cleaving the linker molecule of (a) under conditions suitable for the two siNA oligonucleotide strands to hybridize and form a stable duplex; and (d) purifying the siNA duplex utilizing the chemical moiety of the second oligonucleotide sequence strand. In one embodiment, cleavage of the linker molecule in (c) above takes place during deprotection of the oligonucleotide, for example, under hydrolysis conditions using an alkylamine base such as methylamine. In one embodiment, the method of synthesis comprises solid phase synthesis on a solid support such as controlled pore glass (CPG) or polystyrene, wherein the first sequence of (a) is synthesized on a cleavable linker, such as a succinyl linker, using the solid support as a scaffold. The cleavable linker in (a) used as a scaffold for synthesizing the second strand can comprise similar reactivity as the solid support derivatized linker, such that cleavage of the solid support derivatized linker and the cleavable linker of (a) takes place concomitantly. In another embodiment, the chemical moiety of (b) that can be used to isolate the attached oligonucleotide sequence comprises a trityl group, for example a dimethoxytrityl group, which can be employed in a trityl-on synthesis strategy as described herein. In yet another embodiment, the chemical moiety, such as a dimethoxytrityl group, is removed during purification, for example, using acidic conditions.

[0334] In a further embodiment, the method for siNA synthesis is a solution phase synthesis or hybrid phase synthesis wherein both strands of the siNA duplex are synthesized in tandem using a cleavable linker attached to the first sequence which acts a scaffold for synthesis of the second sequence. Cleavage of the linker under conditions suitable for hybridization of the separate siNA sequence strands results in formation of the double-stranded siNA molecule.

[0335] In another embodiment, the invention features a method for synthesizing a siNA duplex molecule comprising: (a) synthesizing one oligonucleotide sequence strand of the siNA molecule, wherein the sequence comprises a cleavable linker molecule that can be used as a scaffold for the synthesis of another oligonucleotide sequence; (b) synthesizing a second oligonucleotide sequence having complementarity to the first sequence strand on the scaffold of (a), wherein the second sequence comprises the other strand of the double-stranded siNA molecule and wherein the second sequence further comprises a chemical moiety than can be used to isolate the attached oligonucleotide sequence; (c) purifying the product of (b) utilizing the chemical moiety of the second oligonucleotide sequence strand under conditions suitable for isolating the full-length sequence comprising both siNA oligonucleotide strands connected by the cleavable linker and under conditions suitable for the two siNA oligonucleotide strands to hybridize and form a stable duplex. In one embodiment, cleavage of the linker molecule in (c) above takes place during deprotection of the oligonucleotide, for example, under hydrolysis conditions. In another embodiment, cleavage of the linker molecule in (c) above takes place after deprotection of the oligonucleotide. In another embodiment, the method of synthesis comprises solid phase synthesis on a solid support such as controlled pore glass (CPG) or polystyrene, wherein the first sequence of (a) is synthesized on a cleavable linker, such as a succinyl linker, using the solid support as a scaffold. The cleavable linker in (a) used as a scaffold for synthesizing the second strand can comprise similar reactivity or differing reactivity as the solid support derivatized linker, such that cleavage of the solid support derivatized linker and the cleavable linker of (a) takes place either concomitantly or sequentially. In one embodiment, the chemical moiety of (b) that can be used to isolate the attached oligonucleotide sequence comprises a trityl group, for example a dimethoxytrityl group.

[0336] In another embodiment, the invention features a method for making a double-stranded siNA molecule in a single synthetic process comprising: (a) synthesizing an oligonucleotide having a first and a second sequence, wherein the first sequence is complementary to the second sequence, and the first oligonucleotide sequence is linked to the second sequence via a cleavable linker, and wherein a terminal 5′-protecting group, for example, a 5′-O-dimethoxytrityl group (5′-O-DMT) remains on the oligonucleotide having the second sequence; (b) deprotecting the oligonucleotide whereby the deprotection results in the cleavage of the linker joining the two oligonucleotide sequences; and (c) purifying the product of (b) under conditions suitable for isolating the double-stranded siNA molecule, for example using a trityl-on synthesis strategy as described herein.

[0337] In another embodiment, the method of synthesis of siNA molecules of the invention comprises the teachings of Scaringe et al., U.S. Pat. Nos. 5,889,136; 6,008,400; and 6,111,086, incorporated by reference herein in their entirety.

[0338] In one embodiment, the invention features siNA constructs that mediate RNAi against a target polynucleotide (e.g., RNA or DNA target), wherein the siNA construct comprises one or more chemical modifications, for example, one or more chemical modifications having any of Formulae I-VII or any combination thereof that increases the nuclease resistance of the siNA construct.

[0339] In another embodiment, the invention features a method for generating siNA molecules with increased nuclease resistance comprising (a) introducing nucleotides having any of Formula I-VII or any combination thereof into a siNA molecule, and (b) assaying the siNA molecule of step (a) under conditions suitable for isolating siNA molecules having increased nuclease resistance.

[0340] In another embodiment, the invention features a method for generating siNA molecules with improved toxicologic profiles (e.g., having attenuated or no immunostimulatory properties) comprising (a) introducing nucleotides having any of Formula I-VII (e.g., siNA motifs referred to in Table IV) or any combination thereof into a siNA molecule, and (b) assaying the siNA molecule of step (a) under conditions suitable for isolating siNA molecules having improved toxicologic profiles.

[0341] In another embodiment, the invention features a method for generating siNA formulations with improved toxicologic profiles (e.g., having attenuated or no immunostimulatory properties) comprising (a) generating a siNA formulation comprising a siNA molecule of the invention and a delivery vehicle or delivery particle as described herein or as otherwise known in the art, and (b) assaying the siNA formulation of step (a) under conditions suitable for isolating siNA formulations having improved toxicologic profiles.

[0342] In another embodiment, the invention features a method for generating siNA molecules that do not stimulate an interferon response (e.g., no interferon response or attenuated interferon response) in a cell, subject, or organism, comprising (a) introducing nucleotides having any of Formula I-VII (e.g., siNA motifs referred to in Table IV) or any combination thereof into a siNA molecule, and (b) assaying the siNA molecule of step (a) under conditions suitable for isolating siNA molecules that do not stimulate an interferon response.

[0343] In another embodiment, the invention features a method for generating siNA formulations that do not stimulate an interferon response (e.g., no interferon response or attenuated interferon response) in a cell, subject, or organism, comprising (a) generating a siNA formulation comprising a siNA molecule of the invention and a delivery vehicle or delivery particle as described herein or as otherwise known in the art, and (b) assaying the siNA formulation of step (a) under conditions suitable for isolating siNA formulations that do not stimulate an interferon response. In one embodiment, the interferon comprises interferon alpha.

[0344] In another embodiment, the invention features a method for generating siNA molecules that do not stimulate an inflammatory or proinflammatory cytokine response (e.g., no cytokine response or attenuated cytokine response) in a cell, subject, or organism, comprising (a) introducing nucleotides having any of Formula I-VII (e.g., siNA motifs referred to in Table IV) or any combination thereof into a siNA molecule, and (b) assaying the siNA molecule of step (a) under conditions suitable for isolating siNA molecules that do not stimulate a cytokine response. In one embodiment, the cytokine comprises an interleukin such as interleukin-6 (IL-6) and/or tumor necrosis alpha (TNF-α).

[0345] In another embodiment, the invention features a method for generating siNA formulations that do not stimulate an inflammatory or proinflammatory cytokine response (e.g., no cytokine response or attenuated cytokine response) in a cell, subject, or organism, comprising (a) generating a siNA formulation comprising a siNA molecule of the invention and a delivery vehicle or delivery particle as described herein or as otherwise known in the art, and (b) assaying the siNA formulation of step (a) under conditions suitable for isolating siNA formulations that do not stimulate a cytokine response. In one embodiment, the cytokine comprises an interleukin such as interleukin-6 (IL-6) and/or tumor necrosis alpha (TNF-α).

[0346] In another embodiment, the invention features a method for generating siNA molecules that do not stimulate Toll-like Receptor (TLR) response (e.g., no TLR response or attenuated TLR response) in a cell, subject, or organism, comprising (a) introducing nucleotides having any of Formula I-VII (e.g., siNA motifs referred to in Table IV) or any combination thereof into a siNA molecule, and (b) assaying the siNA molecule of step (a) under conditions suitable for isolating siNA molecules that do not stimulate a TLR response. In one embodiment, the TLR comprises TLR3, TLR7, TLR8 and/or TLR9.

[0347] In another embodiment, the invention features a method for generating siNA formulations that do not stimulate a Toll-like Receptor (TLR) response (e.g., no TLR response or attenuated TLR response) in a cell, subject, or organism, comprising (a) generating a siNA formulation comprising a siNA molecule of the invention and a delivery vehicle or delivery particle as described herein or as otherwise known in the art, and (b) assaying the siNA formulation of step (a) under conditions suitable for isolating siNA formulations that do not stimulate a TLR response. In one embodiment, the TLR comprises TLR3, TLR7, TLR8 and/or TLR9.

[0348] In one embodiment, a chemically modified siNA molecule of the invention has an improved toxicologic profile compared to a corresponding siRNA molecule having no chemical modifications or fewer chemical modifications.

[0349] In one embodiment, the invention features a chemically synthesized double stranded short interfering nucleic acid (siNA) molecule that directs cleavage of a target RNA via RNA interference (RNAi), wherein: (a) each strand of said siNA molecule is about 18 to about 38 nucleotides in length; (b) one strand of said siNA molecule comprises nucleotide sequence having sufficient complementarity to said target RNA for the siNA molecule to direct cleavage of the target RNA via RNA interference; and (c) wherein the nucleotide positions within said siNA molecule are chemically modified to reduce the immunostimulatory properties of the siNA molecule to a level below that of a corresponding unmodified siRNA molecule. Such siNA molecules are said to have an improved toxicologic profile compared to an unmodified or minimally modified siNA.

[0350] By “improved toxicologic profile”, is meant that the chemically modified or formulated siNA construct exhibits decreased toxicity in a cell, subject, or organism compared to an unmodified or unformulated siNA, or siNA molecule having fewer modifications or modifications that are less effective in imparting improved toxicology. Such siNA molecules are also considered to have “improved RNAi activity”. In a non-limiting example, siNA molecules and formulations with improved toxicologic profiles are associated with reduced immunostimulatory properties, such as a reduced, decreased or attenuated immunostimulatory response in a cell, subject, or organism compared to an unmodified or unformulated siNA, or siNA molecule having fewer modifications or modifications that are less effective in imparting improved toxicology. Such an improved toxicologic profile is characterized by abrogated or reduced immunostimulation, such as reduction or abrogation of induction of interferons (e.g., interferon alpha), inflammatory cytokines (e.g., interleukins such as IL-6, and/or TNF-alpha), and/or toll like receptors (e.g., TLR-3, TLR-7, TLR-8, and/or TLR-9). In one embodiment, a siNA molecule or formulation with an improved toxicological profile comprises no ribonucleotides. In one embodiment, a siNA molecule or formulation with an improved toxicological profile comprises less than 5 ribonucleotides (e.g., 1, 2, 3, or 4 ribonucleotides). In one embodiment, a siNA molecule or formulation with an improved toxicological profile comprises Stab 7, Stab 8, Stab 11, Stab 12, Stab 13, Stab 16, Stab 17, Stab 18, Stab 19, Stab 20, Stab 23, Stab 24, Stab 25, Stab 26, Stab 27, Stab 28, Stab 29, Stab 30, Stab 31, Stab 32, Stab 33, Stab 34, Stab 35, Stab 36 or any combination thereof (see Table IV). Herein, numeric Stab chemistries include both 2′-fluoro and 2′-OCF3 versions of the chemistries shown in Table IV. For example, “Stab 7/8” refers to both Stab 7/8 and Stab 7F/8F etc. In one embodiment, a siNA molecule or formulation with an improved toxicological profile comprises a siNA molecule of the invention and a formulation as described in United States Patent Application Publication No. 20030077829, incorporated by reference herein in its entirety including the drawings.

[0351] In one embodiment, the level of immunostimulatory response associated with a given siNA molecule can be measured as is described herein or as is otherwise known in the art, for example by determining the level of PKR/interferon response, proliferation, B-cell activation, and/or cytokine production in assays to quantitate the immunostimulatory response of particular siNA molecules (see, for example, Leifer et al., 2003, J. Immunother. 26, 313-9; and U.S. Pat. No. 5,968,909, incorporated in its entirety by reference). In one embodiment, the reduced immunostimulatory response is between about 10% and about 100% compared to an unmodified or minimally modified siRNA molecule, e.g., about 10%, 20%, 30%, 40%, 50%, 60%, 70%, 80%, 90% or 100% reduced immunostimulatory response. In one embodiment, the immunostimulatory response associated with a siNA molecule can be modulated by the degree of chemical modification. For example, a siNA molecule having between about 10% and about 100%, e.g., about 10%, 20%, 30%, 40%, 50%, 60%, 70%, 80%, 90% or 100% or at least about 10%, 20%, 30%, 40%, 50%, 60%, 70%, 80%, 90% or 100% of the nucleotide positions in the siNA molecule modified can be selected to have a corresponding degree of immunostimulatory properties as described herein.

[0352] In one embodiment, the degree of reduced immunostimulatory response is selected for optimized RNAi activity. For example, retaining a certain degree of immunostimulation can be preferred to treat viral infection, where less than 100% reduction in immunostimulation may be preferred for maximal antiviral activity (e.g., about 10%, 20%, 30%, 40%, 50%, 60%, 70%, 80%, or 90% reduction in immunostimulation) whereas the inhibition of expression of an endogenous gene target may be preferred with siNA molecules that possess minimal immunostimulatory properties to prevent non-specific toxicity or off target effects (e.g., about 90% to about 100% reduction in immunostimulation).

[0353] In one embodiment, the invention features a chemically synthesized double stranded siNA molecule that directs cleavage of a target RNA via RNA interference (RNAi), wherein (a) each strand of said siNA molecule is about 18 to about 38 nucleotides in length; (b) one strand of said siNA molecule comprises nucleotide sequence having sufficient complementarity to said target RNA for the siNA molecule to direct cleavage of the target RNA via RNA interference; and (c) wherein one or more nucleotides of said siNA molecule are chemically modified to reduce the immunostimulatory properties of the siNA molecule to a level below that of a corresponding unmodified siNA molecule. In one embodiment, each stand comprises at least about 18 nucleotides that are complementary to the nucleotides of the other strand.

[0354] In another embodiment, the siNA molecule comprising modified nucleotides to reduce the immunostimulatory properties of the siNA molecule comprises an antisense region having nucleotide sequence that is complementary to a nucleotide sequence of a target gene or a portion thereof and further comprises a sense region, wherein said sense region comprises a nucleotide sequence substantially similar to the nucleotide sequence of said target gene or portion thereof. In one embodiment thereof, the antisense region and the sense region comprise about 18 to about 38 nucleotides, wherein said antisense region comprises at least about 18 nucleotides that are complementary to nucleotides of the sense region. In one embodiment thereof, the pyrimidine nucleotides in the sense region are 2′-O-methyl pyrimidine nucleotides. In another embodiment thereof, the purine nucleotides in the sense region are 2′-deoxy purine nucleotides. In yet another embodiment thereof, the pyrimidine nucleotides present in the sense region are 2′-deoxy-2′-fluoro pyrimidine nucleotides. In another embodiment thereof, the pyrimidine nucleotides of said antisense region are 2′-deoxy-2′-fluoro pyrimidine nucleotides. In yet another embodiment thereof, the purine nucleotides of said antisense region are 2′-O-methyl purine nucleotides. In still another embodiment thereof, the purine nucleotides present in said antisense region comprise 2′-deoxypurine nucleotides. In another embodiment, the antisense region comprises a phosphorothioate internucleotide linkage at the 3′ end of said antisense region. In another embodiment, the antisense region comprises a glyceryl modification at a 3′ end of said antisense region.

[0355] In other embodiments, the siNA molecule comprising modified nucleotides to reduce the immunostimulatory properties of the siNA molecule can comprise any of the structural features of siNA molecules described herein. In other embodiments, the siNA molecule comprising modified nucleotides to reduce the immunostimulatory properties of the siNA molecule can comprise any of the chemical modifications of siNA molecules described herein.

[0356] In one embodiment, the invention features a method for generating a chemically synthesized double stranded siNA molecule having chemically modified nucleotides to reduce the immunostimulatory properties of the siNA molecule, comprising (a) introducing one or more modified nucleotides in the siNA molecule, and (b) assaying the siNA molecule of step (a) under conditions suitable for isolating an siNA molecule having reduced immunostimulatory properties compared to a corresponding siNA molecule having unmodified nucleotides. Each strand of the siNA molecule is about 18 to about 38 nucleotides in length. One strand of the siNA molecule comprises nucleotide sequence having sufficient complementarity to the target RNA for the siNA molecule to direct cleavage of the target RNA via RNA interference. In one embodiment, the reduced immunostimulatory properties comprise an abrogated or reduced induction of inflammatory or proinflammatory cytokines, such as interleukin-6 (IL-6) or tumor necrosis alpha (TNF-α), in response to the siNA being introduced in a cell, tissue, or organism. In another embodiment, the reduced immunostimulatory properties comprise an abrogated or reduced induction of Toll Like Receptors (TLRs), such as TLR3, TLR7, TLR8 or TLR9, in response to the siNA being introduced in a cell, tissue, or organism. In another embodiment, the reduced immunostimulatory properties comprise an abrogated or reduced induction of interferons, such as interferon alpha, in response to the siNA being introduced in a cell, tissue, or organism.

[0357] In one embodiment, the invention features siNA constructs that mediate RNAi against a target polynucleotide, wherein the siNA construct comprises one or more chemical modifications described herein that modulates the binding affinity between the sense and antisense strands of the siNA construct.

[0358] In another embodiment, the invention features a method for generating siNA molecules with increased binding affinity between the sense and antisense strands of the siNA molecule comprising (a) introducing nucleotides having any of Formula I-VII or any combination thereof into a siNA molecule, and (b) assaying the siNA molecule of step (a) under conditions suitable for isolating siNA molecules having increased binding affinity between the sense and antisense strands of the siNA molecule.

[0359] In one embodiment, the invention features siNA constructs that mediate RNAi against a target polynucleotide, wherein the siNA construct comprises one or more chemical modifications described herein that modulates the binding affinity between the antisense strand of the siNA construct and a complementary target RNA sequence within a cell.

[0360] In one embodiment, the invention features siNA constructs that mediate RNAi against a target polynucleotide, wherein the siNA construct comprises one or more chemical modifications described herein that modulates the binding affinity between the antisense strand of the siNA construct and a complementary target DNA sequence within a cell.

[0361] In another embodiment, the invention features a method for generating siNA molecules with increased binding affinity between the antisense strand of the siNA molecule and a complementary target RNA sequence comprising (a) introducing nucleotides having any of Formula I-VII or any combination thereof into a siNA molecule, and (b) assaying the siNA molecule of step (a) under conditions suitable for isolating siNA molecules having increased binding affinity between the antisense strand of the siNA molecule and a complementary target RNA sequence.

[0362] In another embodiment, the invention features a method for generating siNA molecules with increased binding affinity between the antisense strand of the siNA molecule and a complementary target DNA sequence comprising (a) introducing nucleotides having any of Formula I-VII or any combination thereof into a siNA molecule, and (b) assaying the siNA molecule of step (a) under conditions suitable for isolating siNA molecules having increased binding affinity between the antisense strand of the siNA molecule and a complementary target DNA sequence.

[0363] In one embodiment, the invention features siNA constructs that mediate RNAi against a target polynucleotide, wherein the siNA construct comprises one or more chemical modifications described herein that modulate the polymerase activity of a cellular polymerase capable of generating additional endogenous siNA molecules having sequence homology to the chemically-modified siNA construct.

[0364] In another embodiment, the invention features a method for generating siNA molecules capable of mediating increased polymerase activity of a cellular polymerase capable of generating additional endogenous siNA molecules having sequence homology to a chemically-modified siNA molecule comprising (a) introducing nucleotides having any of Formula I-VII or any combination thereof into a siNA molecule, and (b) assaying the siNA molecule of step (a) under conditions suitable for isolating siNA molecules capable of mediating increased polymerase activity of a cellular polymerase capable of generating additional endogenous siNA molecules having sequence homology to the chemically-modified siNA molecule.

[0365] In one embodiment, the invention features chemically-modified siNA constructs that mediate RNAi against a target polynucleotide in a cell, wherein the chemical modifications do not significantly effect the interaction of siNA with a target RNA molecule, DNA molecule and/or proteins or other factors that are essential for RNAi in a manner that would decrease the efficacy of RNAi mediated by such siNA constructs.

[0366] In another embodiment, the invention features a method for generating siNA molecules with improved RNAi specificity against polynucleotide targets comprising (a) introducing nucleotides having any of Formula I-VII or any combination thereof into a siNA molecule, and (b) assaying the siNA molecule of step (a) under conditions suitable for isolating siNA molecules having improved RNAi specificity. In one embodiment, improved specificity comprises having reduced off target effects compared to an unmodified siNA molecule. For example, introduction of terminal cap moieties at the 3′-end, 5′-end, or both 3′ and 5′-ends of the sense strand or region of a siNA molecule of the invention can direct the siNA to have improved specificity by preventing the sense strand or sense region from acting as a template for RNAi activity against a corresponding target having complementarity to the sense strand or sense region.

[0367] In another embodiment, the invention features a method for generating siNA molecules with improved RNAi activity against a target polynucleotide comprising (a) introducing nucleotides having any of Formula I-VII or any combination thereof into a siNA molecule, and (b) assaying the siNA molecule of step (a) under conditions suitable for isolating siNA molecules having improved RNAi activity.

[0368] In yet another embodiment, the invention features a method for generating siNA molecules with improved RNAi activity against a target RNA comprising (a) introducing nucleotides having any of Formula I-VII or any combination thereof into a siNA molecule, and (b) assaying the siNA molecule of step (a) under conditions suitable for isolating siNA molecules having improved RNAi activity against the target RNA.

[0369] In yet another embodiment, the invention features a method for generating siNA molecules with improved RNAi activity against a target DNA comprising (a) introducing nucleotides having any of Formula I-VII or any combination thereof into a siNA molecule, and (b) assaying the siNA molecule of step (a) under conditions suitable for isolating siNA molecules having improved RNAi activity against the target DNA.

[0370] In one embodiment, the invention features siNA constructs that mediate RNAi against a target polynucleotide, wherein the siNA construct comprises one or more chemical modifications described herein that modulates the cellular uptake of the siNA construct, such as cholesterol conjugation of the siNA.

[0371] In another embodiment, the invention features a method for generating siNA molecules against a target polynucleotide with improved cellular uptake comprising (a) introducing nucleotides having any of Formula I-VII or any combination thereof into a siNA molecule, and (b) assaying the siNA molecule of step (a) under conditions suitable for isolating siNA molecules having improved cellular uptake.

[0372] In one embodiment, the invention features siNA constructs that mediate RNAi against a target polynucleotide, wherein the siNA construct comprises one or more chemical modifications described herein that increases the bioavailability of the siNA construct, for example, by attaching polymeric conjugates such as polyethyleneglycol or equivalent conjugates that improve the pharmacokinetics of the siNA construct, or by attaching conjugates that target specific tissue types or cell types in vivo. Non-limiting examples of such conjugates are described in Vargeese et al., U.S. Ser. No. 10/201,394 incorporated by reference herein.

[0373] In one embodiment, the invention features a method for generating siNA molecules of the invention with improved bioavailability comprising (a) introducing a conjugate into the structure of a siNA molecule, and (b) assaying the siNA molecule of step (a) under conditions suitable for isolating siNA molecules having improved bioavailability. Such conjugates can include ligands for cellular receptors, such as peptides derived from naturally occurring protein ligands; protein localization sequences, including cellular ZIP code sequences; antibodies; nucleic acid aptamers; vitamins and other co-factors, such as folate and N-acetylgalactosamine; polymers, such as polyethyleneglycol (PEG); phospholipids; cholesterol; cholesterol derivatives, polyamines, such as spermine or spermidine; and others.

[0374] In one embodiment, the invention features a double stranded short interfering nucleic acid (siNA) molecule that comprises a first nucleotide sequence complementary to a target RNA sequence or a portion thereof, and a second sequence having complementarity to said first sequence, wherein said second sequence is chemically modified in a manner that it can no longer act as a guide sequence for efficiently mediating RNA interference and/or be recognized by cellular proteins that facilitate RNAi. In one embodiment, the first nucleotide sequence of the siNA is chemically modified as described herein. In one embodiment, the first nucleotide sequence of the siNA is not modified (e.g., is all RNA).

[0375] In one embodiment, the invention features a double stranded short interfering nucleic acid (siNA) molecule that comprises a first nucleotide sequence complementary to a target RNA sequence or a portion thereof, and a second sequence having complementarity to said first sequence, wherein the second sequence is designed or modified in a manner that prevents its entry into the RNAi pathway as a guide sequence or as a sequence that is complementary to a target nucleic acid (e.g., RNA) sequence. In one embodiment, the first nucleotide sequence of the siNA is chemically modified as described herein. In one embodiment, the first nucleotide sequence of the siNA is not modified (e.g., is all RNA). Such design or modifications are expected to enhance the activity of siNA and/or improve the specificity of siNA molecules of the invention. These modifications are also expected to minimize any off-target effects and/or associated toxicity.

[0376] In one embodiment, the invention features a double stranded short interfering nucleic acid (siNA) molecule that comprises a first nucleotide sequence complementary to a target RNA sequence or a portion thereof, and a second sequence having complementarity to said first sequence, wherein said second sequence is incapable of acting as a guide sequence for mediating RNA interference. In one embodiment, the first nucleotide sequence of the siNA is chemically modified as described herein. In one embodiment, the first nucleotide sequence of the siNA is not modified (e.g., is all RNA).

[0377] In one embodiment, the invention features a double stranded short interfering nucleic acid (siNA) molecule that comprises a first nucleotide sequence complementary to a target RNA sequence or a portion thereof, and a second sequence having complementarity to said first sequence, wherein said second sequence does not have a terminal 5′-hydroxyl (5′-OH) or 5′-phosphate group.

[0378] In one embodiment, the invention features a double stranded short interfering nucleic acid (siNA) molecule that comprises a first nucleotide sequence complementary to a target RNA sequence or a portion thereof, and a second sequence having complementarity to said first sequence, wherein said second sequence comprises a terminal cap moiety at the 5′-end of said second sequence. In one embodiment, the terminal cap moiety comprises an inverted abasic, inverted deoxy abasic, inverted nucleotide moiety, a group shown in FIG. 10, an alkyl or cycloalkyl group, a heterocycle, or any other group that prevents RNAi activity in which the second sequence serves as a guide sequence or template for RNAi.

[0379] In one embodiment, the invention features a double stranded short interfering nucleic acid (siNA) molecule that comprises a first nucleotide sequence complementary to a target RNA sequence or a portion thereof, and a second sequence having complementarity to said first sequence, wherein said second sequence comprises a terminal cap moiety at the 5′-end and 3′-end of said second sequence. In one embodiment, each terminal cap moiety individually comprises an inverted abasic, inverted deoxy abasic, inverted nucleotide moiety, a group shown in FIG. 10, an alkyl or cycloalkyl group, a heterocycle, or any other group that prevents RNAi activity in which the second sequence serves as a guide sequence or template for RNAi.

[0380] In one embodiment, the invention features a method for generating siNA molecules of the invention with improved specificity for down regulating or inhibiting the expression of a target nucleic acid (e.g., a DNA or RNA such as a gene or its corresponding RNA), comprising (a) introducing one or more chemical modifications into the structure of a siNA molecule, and (b) assaying the siNA molecule of step (a) under conditions suitable for isolating siNA molecules having improved specificity. In another embodiment, the chemical modification used to improve specificity comprises terminal cap modifications at the 5′-end, 3′-end, or both 5′ and 3′-ends of the siNA molecule. The terminal cap modifications can comprise, for example, structures shown in FIG. 10 (e.g. inverted deoxyabasic moieties) or any other chemical modification that renders a portion of the siNA molecule (e.g. the sense strand) incapable of mediating RNA interference against an off target nucleic acid sequence. In a non-limiting example, a siNA molecule is designed such that only the antisense sequence of the siNA molecule can serve as a guide sequence for RISC mediated degradation of a corresponding target RNA sequence. This can be accomplished by rendering the sense sequence of the siNA inactive by introducing chemical modifications to the sense strand that preclude recognition of the sense strand as a guide sequence by RNAi machinery. In one embodiment, such chemical modifications comprise any chemical group at the 5′-end of the sense strand of the siNA, or any other group that serves to render the sense strand inactive as a guide sequence for mediating RNA interference. These modifications, for example, can result in a molecule where the 5′-end of the sense strand no longer has a free 5′-hydroxyl (5′-OH) or a free 5′-phosphate group (e.g., phosphate, diphosphate, triphosphate, cyclic phosphate etc.). Non-limiting examples of such siNA constructs are described herein, such as “Stab 9/10”, “Stab 7/8”, “Stab 7/19”, “Stab 17/22”, “Stab 23/24”, “Stab 24/25”, and “Stab 24/26” (e.g., any siNA having Stab 7, 9, 17, 23, or 24 sense strands) chemistries and variants thereof (see Table IV) wherein the 5′-end and 3′-end of the sense strand of the siNA do not comprise a hydroxyl group or phosphate group. Herein, numeric Stab chemistries include both 2′-fluoro and 2′-OCF3 versions of the chemistries shown in Table IV. For example, “Stab 7/8” refers to both Stab 7/8 and Stab 7F/8F etc.

[0381] In one embodiment, the invention features a method for generating siNA molecules of the invention with improved specificity for down regulating or inhibiting the expression of a target nucleic acid (e.g., a DNA or RNA such as a gene or its corresponding RNA), comprising introducing one or more chemical modifications into the structure of a siNA molecule that prevent a strand or portion of the siNA molecule from acting as a template or guide sequence for RNAi activity. In one embodiment, the inactive strand or sense region of the siNA molecule is the sense strand or sense region of the siNA molecule, i.e. the strand or region of the siNA that does not have complementarity to the target nucleic acid sequence. In one embodiment, such chemical modifications comprise any chemical group at the 5′-end of the sense strand or region of the siNA that does not comprise a 5′-hydroxyl (5′-OH) or 5′-phosphate group, or any other group that serves to render the sense strand or sense region inactive as a guide sequence for mediating RNA interference. Non-limiting examples of such siNA constructs are described herein, such as “Stab 9/10”, “Stab 7/8”, “Stab 7/19”, “Stab 17/22”, “Stab 23/24”, “Stab 24/25”, and “Stab 24/26” (e.g., any siNA having Stab 7, 9, 17, 23, or 24 sense strands) chemistries and variants thereof (see Table IV) wherein the 5′-end and 3′-end of the sense strand of the siNA do not comprise a hydroxyl group or phosphate group. Herein, numeric Stab chemistries include both 2′-fluoro and 2′-OCF3 versions of the chemistries shown in Table IV. For example, “Stab 7/8” refers to both Stab 7/8 and Stab 7F/8F etc.

[0382] In one embodiment, the invention features a method for screening siNA molecules that are active in mediating RNA interference against a target nucleic acid sequence comprising (a) generating a plurality of unmodified siNA molecules, (b) screening the siNA molecules of step (a) under conditions suitable for isolating siNA molecules that are active in mediating RNA interference against the target nucleic acid sequence, and (c) introducing chemical modifications (e.g. chemical modifications as described herein or as otherwise known in the art) into the active siNA molecules of (b). In one embodiment, the method further comprises re-screening the chemically modified siNA molecules of step (c) under conditions suitable for isolating chemically modified siNA molecules that are active in mediating RNA interference against the target nucleic acid sequence.

[0383] In one embodiment, the invention features a method for screening chemically modified siNA molecules that are active in mediating RNA interference against a target nucleic acid sequence comprising (a) generating a plurality of chemically modified siNA molecules (e.g. siNA molecules as described herein or as otherwise known in the art), and (b) screening the siNA molecules of step (a) under conditions suitable for isolating chemically modified siNA molecules that are active in mediating RNA interference against the target nucleic acid sequence.

[0384] The term “ligand” refers to any compound or molecule, such as a drug, peptide, hormone, or neurotransmitter, that is capable of interacting with another compound, such as a receptor, either directly or indirectly. The receptor that interacts with a ligand can be present on the surface of a cell or can alternately be an intercellular receptor. Interaction of the ligand with the receptor can result in a biochemical reaction, or can simply be a physical interaction or association.

[0385] In another embodiment, the invention features a method for generating siNA molecules of the invention with improved bioavailability comprising (a) introducing an excipient formulation to a siNA molecule, and (b) assaying the siNA molecule of step (a) under conditions suitable for isolating siNA molecules having improved bioavailability. Such excipients include polymers such as cyclodextrins, lipids, cationic lipids, polyamines, phospholipids, nanoparticles, receptors, ligands, and others.

[0386] In another embodiment, the invention features a method for generating siNA molecules of the invention with improved bioavailability comprising (a) introducing nucleotides having any of Formulae I-VII or any combination thereof into a siNA molecule, and (b) assaying the siNA molecule of step (a) under conditions suitable for isolating siNA molecules having improved bioavailability.

[0387] In another embodiment, polyethylene glycol (PEG) can be covalently attached to siNA compounds of the present invention. The attached PEG can be any molecular weight, preferably from about 100 to about 50,000 daltons (Da).

[0388] The present invention can be used alone or as a component of a kit having at least one of the reagents necessary to carry out the in vitro or in vivo introduction of RNA to test samples and/or subjects. For example, preferred components of the kit include a siNA molecule of the invention and a vehicle that promotes introduction of the siNA into cells of interest as described herein (e.g., using lipids and other methods of transfection known in the art, see for example Beigelman et al, U.S. Pat. No. 6,395,713). The kit can be used for target validation, such as in determining gene function and/or activity, or in drug optimization, and in drug discovery (see for example Usman et al., U.S. Ser. No. 60/402,996). Such a kit can also include instructions to allow a user of the kit to practice the invention.

[0389] The term “short interfering nucleic acid”, “siNA”, “short interfering RNA”, “siRNA”, “short interfering nucleic acid molecule”, “short interfering oligonucleotide molecule”, or “chemically-modified short interfering nucleic acid molecule” as used herein refers to any nucleic acid molecule capable of inhibiting or down regulating gene expression or viral replication by mediating RNA interference “RNAi” or gene silencing in a sequence-specific manner. These terms can refer to both individual nucleic acid molecules, a plurality of such nucleic acid molecules, or pools of such nucleic acid molecules. The siNA can be a double-stranded nucleic acid molecule comprising self-complementary sense and antisense regions, wherein the antisense region comprises nucleotide sequence that is complementary to nucleotide sequence in a target nucleic acid molecule or a portion thereof and the sense region having nucleotide sequence corresponding to the target nucleic acid sequence or a portion thereof. The siNA can be assembled from two separate oligonucleotides, where one strand is the sense strand and the other is the antisense strand, wherein the antisense and sense strands are self-complementary (i.e., each strand comprises nucleotide sequence that is complementary to nucleotide sequence in the other strand; such as where the antisense strand and sense strand form a duplex or double stranded structure, for example wherein the double stranded region is about 15 to about 30, e.g., about 15, 16, 17, 18, 19, 20, 21, 22, 23, 24, 25, 26, 27, 28, 29 or 30 base pairs; the antisense strand comprises nucleotide sequence that is complementary to nucleotide sequence in a target nucleic acid molecule or a portion thereof and the sense strand comprises nucleotide sequence corresponding to the target nucleic acid sequence or a portion thereof (e.g., about 15 to about 25 or more nucleotides of the siNA molecule are complementary to the target nucleic acid or a portion thereof). Alternatively, the siNA is assembled from a single oligonucleotide, where the self-complementary sense and antisense regions of the siNA are linked by means of a nucleic acid based or non-nucleic acid-based linker(s). The siNA can be a polynucleotide with a duplex, asymmetric duplex, hairpin or asymmetric hairpin secondary structure, having self-complementary sense and antisense regions, wherein the antisense region comprises nucleotide sequence that is complementary to nucleotide sequence in a separate target nucleic acid molecule or a portion thereof and the sense region having nucleotide sequence corresponding to the target nucleic acid sequence or a portion thereof. The siNA can be a circular single-stranded polynucleotide having two or more loop structures and a stem comprising self-complementary sense and antisense regions, wherein the antisense region comprises nucleotide sequence that is complementary to nucleotide sequence in a target nucleic acid molecule or a portion thereof and the sense region having nucleotide sequence corresponding to the target nucleic acid sequence or a portion thereof, and wherein the circular polynucleotide can be processed either in vivo or in vitro to generate an active siNA molecule capable of mediating RNAi. The siNA can also comprise a single stranded polynucleotide having nucleotide sequence complementary to nucleotide sequence in a target nucleic acid molecule or a portion thereof (for example, where such siNA molecule does not require the presence within the siNA molecule of nucleotide sequence corresponding to the target nucleic acid sequence or a portion thereof), wherein the single stranded polynucleotide can further comprise a terminal phosphate group, such as a 5′-phosphate (see for example Martinez et al., 2002, Cell., 110, 563-574 and Schwarz et al., 2002, Molecular Cell, 10, 537-568), or 5′,3′-diphosphate. In certain embodiments, the siNA molecule of the invention comprises separate sense and antisense sequences or regions, wherein the sense and antisense regions are covalently linked by nucleotide or non-nucleotide linkers molecules as is known in the art, or are alternately non-covalently linked by ionic interactions, hydrogen bonding, van der waals interactions, hydrophobic interactions, and/or stacking interactions. In certain embodiments, the siNA molecules of the invention comprise nucleotide sequence that is complementary to nucleotide sequence of a target gene. In another embodiment, the siNA molecule of the invention interacts with nucleotide sequence of a target gene in a manner that causes inhibition of expression of the target gene. As used herein, siNA molecules need not be limited to those molecules containing only RNA, but further encompasses chemically-modified nucleotides and non-nucleotides. In certain embodiments, the short interfering nucleic acid molecules of the invention lack 2′-hydroxy (2′-OH) containing nucleotides. Applicant describes in certain embodiments short interfering nucleic acids that do not require the presence of nucleotides having a 2′-hydroxy group for mediating RNAi and as such, short interfering nucleic acid molecules of the invention optionally do not include any ribonucleotides (e.g., nucleotides having a 2′-OH group). Such siNA molecules that do not require the presence of ribonucleotides within the siNA molecule to support RNAi can however have an attached linker or linkers or other attached or associated groups, moieties, or chains containing one or more nucleotides with 2′-OH groups. Optionally, siNA molecules can comprise ribonucleotides at about 5, 10, 20, 30, 40, or 50% of the nucleotide positions. The modified short interfering nucleic acid molecules of the invention can also be referred to as short interfering modified oligonucleotides “siMON.” As used herein, the term siNA is meant to be equivalent to other terms used to describe nucleic acid molecules that are capable of mediating sequence specific RNAi, for example short interfering RNA (siRNA), double-stranded RNA (dsRNA), micro-RNA (miRNA), short hairpin RNA (shRNA), short interfering oligonucleotide, short interfering nucleic acid, short interfering modified oligonucleotide, chemically-modified siRNA, post-transcriptional gene silencing RNA (ptgsRNA), and others. Non limiting examples of siNA molecules of the invention are shown in FIGS. 4-6, and Tables II and III herein. Such siNA molecules are distinct from other nucleic acid technologies known in the art that mediate inhibition of gene expression, such as ribozymes, antisense, triplex forming, aptamer, 2,5-A chimera, or decoy oligonucleotides.

[0390] By “RNA interference” or “RNAi” is meant a biological process of inhibiting or down regulating gene expression in a cell as is generally known in the art and which is mediated by short interfering nucleic acid molecules, see for example Zamore and Haley, 2005, Science, 309, 1519-1524; Vaughn and Martienssen, 2005, Science, 309, 1525-1526; Zamore et al., 2000, Cell, 101, 25-33; Bass, 2001, Nature, 411, 428-429; Elbashir et al., 2001, Nature, 411, 494-498; and Kreutzer et al., International PCT Publication No. WO 00/44895; Zernicka-Goetz et al., International PCT Publication No. WO 01/36646; Fire, International PCT Publication No. WO 99/32619; Plaetinck et al., International PCT Publication No. WO 00/01846; Mello and Fire, International PCT Publication No. WO 01/29058; Deschamps-Depaillette, International PCT Publication No. WO 99/07409; and Li et al., International PCT Publication No. WO 00/44914; Allshire, 2002, Science, 297, 1818-1819; Volpe et al., 2002, Science, 297, 1833-1837; Jenuwein, 2002, Science, 297, 2215-2218; and Hall et al., 2002, Science, 297, 2232-2237; Hutvagner and Zamore, 2002, Science, 297, 2056-60; McManus et al., 2002, RNA, 8, 842-850; Reinhart et al., 2002, gene & Dev., 16, 1616-1626; and Reinhart & Bartel, 2002, Science, 297, 1831). In addition, as used herein, the term RNAi is meant to be equivalent to other terms used to describe sequence specific RNA interference, such as post transcriptional gene silencing, translational inhibition, transcriptional inhibition, or epigenetics. For example, siNA molecules of the invention can be used to epigenetically silence genes at both the post-transcriptional level or the pre-transcriptional level. In a non-limiting example, epigenetic modulation of gene expression by siNA molecules of the invention can result from siNA mediated modification of chromatin structure or methylation patterns to alter gene expression (see, for example, Verdel et al., 2004, Science, 303, 672-676; Pal-Bhadra et al., 2004, Science, 303, 669-672; Allshire, 2002, Science, 297, 1818-1819; Volpe et al., 2002, Science, 297, 1833-1837; Jenuwein, 2002, Science, 297, 2215-2218; and Hall et al., 2002, Science, 297, 2232-2237). In another non-limiting example, modulation of gene expression by siNA molecules of the invention can result from siNA mediated cleavage of RNA (either coding or non-coding RNA) via RISC, or alternately, translational inhibition as is known in the art. In another embodiment, modulation of gene expression by siNA molecules of the invention can result from transcriptional inhibition (see for example Janowski et al., 2005, Nature Chemical Biology, 1, 216-222).

[0391] In one embodiment, a siNA molecule of the invention is a duplex forming oligonucleotide “DFO”, (see for example FIGS. 14-15 and Vaish et al., U.S. Ser. No. 10/727,780 filed Dec. 3, 2003 and International PCT Application No. US04/16390, filed May 24, 2004).

[0392] In one embodiment, a siNA molecule of the invention is a multifunctional siNA, (see for example FIGS. 16-28 and Jadhav et al., U.S. Ser. No. 60/543,480 filed Feb. 10, 2004 and International PCT Application No. US04/16390, filed May 24, 2004). In one embodiment, the multifunctional siNA of the invention can comprise sequence targeting, for example, two or more regions of target RNA (see for example target sequences in Tables II and III). In one embodiment, the multifunctional siNA of the invention can comprise sequence targeting one or more different targets, including coding regions and non-coding regions of HCV or HCV pathway/host RNA.

[0393] By “asymmetric hairpin” as used herein is meant a linear siNA molecule comprising an antisense region, a loop portion that can comprise nucleotides or non-nucleotides, and a sense region that comprises fewer nucleotides than the antisense region to the extent that the sense region has enough complementary nucleotides to base pair with the antisense region and form a duplex with loop. For example, an asymmetric hairpin siNA molecule of the invention can comprise an antisense region having length sufficient to mediate RNAi in a cell or in vitro system (e.g. about 15 to about 30, or about 15, 16, 17, 18, 19, 20, 21, 22, 23, 24, 25, 26, 27, 28, 29, or 30 nucleotides) and a loop region comprising about 4 to about 12 (e.g., about 4, 5, 6, 7, 8, 9, 10, 11, or 12) nucleotides, and a sense region having about 3 to about 25 (e.g., about 3, 4, 5, 6, 7, 8, 9, 10, 11, 12, 13, 14, 15, 16, 17, 18, 19, 20, 21, 22, 23, 24, or 25) nucleotides that are complementary to the antisense region. The asymmetric hairpin siNA molecule can also comprise a 5′-terminal phosphate group that can be chemically modified. The loop portion of the asymmetric hairpin siNA molecule can comprise nucleotides, non-nucleotides, linker molecules, or conjugate molecules as described herein.

[0394] By “asymmetric duplex” as used herein is meant a siNA molecule having two separate strands comprising a sense region and an antisense region, wherein the sense region comprises fewer nucleotides than the antisense region to the extent that the sense region has enough complementary nucleotides to base pair with the antisense region and form a duplex. For example, an asymmetric duplex siNA molecule of the invention can comprise an antisense region having length sufficient to mediate RNAi in a cell or in vitro system (e.g., about 15 to about 30, or about 15, 16, 17, 18, 19, 20, 21, 22, 23, 24, 25, 26, 27, 28, 29, or 30 nucleotides) and a sense region having about 3 to about 25 (e.g., about 3, 4, 5, 6, 7, 8, 9, 10, 11, 12, 13, 14, 15, 16, 17, 18, 19, 20, 21, 22, 23, 24, or 25) nucleotides that are complementary to the antisense region.

[0395] By “RNAi inhibitor” is meant any molecule that can down regulate, reduce or inhibit RNA interference function or activity in a cell or organism. An RNAi inhibitor can down regulate, reduce or inhibit RNAi (e.g., RNAi mediated cleavage of a target polynucleotide, translational inhibition, or transcriptional silencing) by interaction with or interfering the function of any component of the RNAi pathway, including protein components such as RISC, or nucleic acid components such as miRNAs or siRNAs. A RNAi inhibitor can be a siNA molecule, an antisense molecule, an aptamer, or a small molecule that interacts with or interferes with the function of RISC, a miRNA, or a siRNA or any other component of the RNAi pathway in a cell or organism. By inhibiting RNAi (e.g., RNAi mediated cleavage of a target polynucleotide, translational inhibition, or transcriptional silencing), a RNAi inhibitor of the invention can be used to modulate (e.g, up-regulate or down regulate) the expression of a target gene. In one embodiment, a RNA inhibitor of the invention is used to up-regulate gene expression by interfering with (e.g., reducing or preventing) endogenous down-regulation or inhibition of gene expression through translational inhibition, transcriptional silencing, or RISC mediated cleavage of a polynucleotide (e.g., mRNA). By interfering with mechanisms of endogenous repression, silencing, or inhibition of gene expression, RNAi inhibitors of the invention can therefore be used to up-regulate gene expression for the treatment of diseases, traits, or conditions resulting from a loss of function. In one embodiment, the term “RNAi inhibitor” is used in place of the term “siNA” in the various embodiments herein, for example, with the effect of increasing gene expression for the treatment of loss of function diseases, traits, and/or conditions.

[0396] By “aptamer” or “nucleic acid aptamer” as used herein is meant a polynucleotide that binds specifically to a target molecule wherein the nucleic acid molecule has sequence that is distinct from sequence recognized by the target molecule in its natural setting. Alternately, an aptamer can be a nucleic acid molecule that binds to a target molecule where the target molecule does not naturally bind to a nucleic acid. The target molecule can be any molecule of interest. For example, the aptamer can be used to bind to a ligand-binding domain of a protein, thereby preventing interaction of the naturally occurring ligand with the protein. This is a non-limiting example and those in the art will recognize that other embodiments can be readily generated using techniques generally known in the art, see for example Gold et al., 1995, Annu. Rev. Biochem., 64, 763; Brody and Gold, 2000, J. Biotechnol., 74, 5; Sun, 2000, Curr. Opin. Mol. Ther., 2, 100; Kusser, 2000, J. Biotechnol., 74, 27; Hermann and Patel, 2000, Science, 287, 820; and Jayasena, 1999, Clinical Chemistry, 45, 1628. Aptamer molecules of the invention can be chemically modified as is generally known in the art or as described herein.

[0397] The term “antisense nucleic acid”, as used herein, refers to a nucleic acid molecule that binds to target RNA by means of RNA-RNA or RNA-DNA or RNA-PNA (protein nucleic acid; Egholm et al., 1993 Nature 365, 566) interactions and alters the activity of the target RNA (for a review, see Stein and Cheng, 1993 Science 261, 1004 and Woolf et al., U.S. Pat. No. 5,849,902) by steric interaction or by RNase H mediated target recognition. Typically, antisense molecules are complementary to a target sequence along a single contiguous sequence of the antisense molecule. However, in certain embodiments, an antisense molecule can bind to substrate such that the substrate molecule forms a loop, and/or an antisense molecule can bind such that the antisense molecule forms a loop. Thus, the antisense molecule can be complementary to two (or even more) non-contiguous substrate sequences or two (or even more) non-contiguous sequence portions of an antisense molecule can be complementary to a target sequence or both. For a review of current antisense strategies, see Schmajuk et al., 1999, J. Biol. Chem., 274, 21783-21789, Delihas et al., 1997, Nature, 15, 751-753, Stein et al., 1997, Antisense N. A. Drug Dev., 7, 151, Crooke, 2000, Methods Enzymol., 313, 3-45; Crooke, 1998, Biotech. genet. Eng. Rev., 15, 121-157, Crooke, 1997, Ad. Pharmacol., 40, 1-49. In addition, antisense DNA or antisense modified with 2′-MOE and other modifications as are known in the art can be used to target RNA by means of DNA-RNA interactions, thereby activating RNase H, which digests the target RNA in the duplex. The antisense oligonucleotides can comprise one or more RNAse H activating region, which is capable of activating RNAse H cleavage of a target RNA. Antisense DNA can be synthesized chemically or expressed via the use of a single stranded DNA expression vector or equivalent thereof. Antisense molecules of the invention can be chemically modified as is generally known in the art or as described herein.

[0398] By “modulate” is meant that the expression of the gene, or level of a RNA molecule or equivalent RNA molecules encoding one or more proteins or protein subunits, or activity of one or more proteins or protein subunits is up regulated or down regulated, such that expression, level, or activity is greater than or less than that observed in the absence of the modulator. For example, the term “modulate” can mean “inhibit,” but the use of the word “modulate” is not limited to this definition.

[0399] By “inhibit”, “down-regulate”, or “reduce”, it is meant that the expression of the gene, or level of RNA molecules or equivalent RNA molecules encoding one or more proteins or protein subunits, or activity of one or more proteins or protein subunits, is reduced below that observed in the absence of the nucleic acid molecules (e.g., siNA) of the invention. In one embodiment, inhibition, down-regulation or reduction with an siNA molecule is below that level observed in the presence of an inactive or attenuated molecule. In another embodiment, inhibition, down-regulation, or reduction with siNA molecules is below that level observed in the presence of, for example, an siNA molecule with scrambled sequence or with mismatches. In another embodiment, inhibition, down-regulation, or reduction of gene expression with a nucleic acid molecule of the instant invention is greater in the presence of the nucleic acid molecule than in its absence. In one embodiment, inhibition, down regulation, or reduction of gene expression is associated with post transcriptional silencing, such as RNAi mediated cleavage of a target nucleic acid molecule (e.g. RNA) or inhibition of translation. In one embodiment, inhibition, down regulation, or reduction of gene expression is associated with pretranscriptional silencing, such as by alterations in DNA methylation patterns and DNA chromatin structure.

[0400] By “up-regulate”, or “promote”, it is meant that the expression of the gene, or level of RNA molecules or equivalent RNA molecules encoding one or more proteins or protein subunits, or activity of one or more proteins or protein subunits, is increased above that observed in the absence of the nucleic acid molecules (e.g., siNA) of the invention. In one embodiment, up-regulation or promotion of gene expression with an siNA molecule is above that level observed in the presence of an inactive or attenuated molecule. In another embodiment, up-regulation or promotion of gene expression with siNA molecules is above that level observed in the presence of, for example, an siNA molecule with scrambled sequence or with mismatches. In another embodiment, up-regulation or promotion of gene expression with a nucleic acid molecule of the instant invention is greater in the presence of the nucleic acid molecule than in its absence. In one embodiment, up-regulation or promotion of gene expression is associated with inhibition of RNA mediated gene silencing, such as RNAi mediated cleavage or silencing of a coding or non-coding RNA target that down regulates, inhibits, or silences the expression of the gene of interest to be up-regulated. The down regulation of gene expression can, for example, be induced by a coding RNA or its encoded protein, such as through negative feedback or antagonistic effects. The down regulation of gene expression can, for example, be induced by a non-coding RNA having regulatory control over a gene of interest, for example by silencing expression of the gene via translational inhibition, chromatin structure, methylation, RISC mediated RNA cleavage, or translational inhibition. As such, inhibition or down regulation of targets that down regulate, suppress, or silence a gene of interest can be used to up-regulate or promote expression of the gene of interest toward therapeutic use.

[0401] In one embodiment, a RNAi inhibitor of the invention is used to up regulate gene expression by inhibiting RNAi or gene silencing. For example, a RNAi inhibitor of the invention can be used to treat loss of function diseases and conditions by up-regulating gene expression, such as in instances of haploinsufficiency where one allele of a particular gene harbors a mutation (e.g., a frameshift, missense, or nonsense mutation) resulting in a loss of function of the protein encoded by the mutant allele. In such instances, the RNAi inhibitor can be used to up regulate expression of the protein encoded by the wild type or functional allele, thus correcting the haploinsufficiency by compensating for the mutant or null allele. In another embodiment, a siNA molecule of the invention is used to down regulate expression of a toxic gain of function allele while a RNAi inhibitor of the invention is used concomitantly to up regulate expression of the wild type or functional allele, such as in the treatment of diseases, traits, or conditions herein or otherwise known in the art (see for example Rhodes et al., 2004, PNAS USA, 101:11147-11152 and Meisler et al. 2005, The Journal of Clinical Investigation, 115:2010-2017).

[0402] By “gene”, or “target gene” or “target DNA”, is meant a nucleic acid that encodes an RNA, for example, nucleic acid sequences including, but not limited to, structural genes encoding a polypeptide. A gene or target gene can also encode a functional RNA (FRNA) or non-coding RNA (ncRNA), such as small temporal RNA (stRNA), micro RNA (miRNA), small nuclear RNA (snRNA), short interfering RNA (siRNA), small nucleolar RNA (snRNA), ribosomal RNA (rRNA), transfer RNA (tRNA) and precursor RNAs thereof. Such non-coding RNAs can serve as target nucleic acid molecules for siNA mediated RNA interference in modulating the activity of fRNA or ncRNA involved in functional or regulatory cellular processes. Abberant fRNA or ncRNA activity leading to disease can therefore be modulated by siNA molecules of the invention. siNA molecules targeting fRNA and ncRNA can also be used to manipulate or alter the genotype or phenotype of a subject, organism or cell, by intervening in cellular processes such as genetic imprinting, transcription, translation, or nucleic acid processing (e.g., transamination, methylation etc.). The target gene can be a gene derived from a cell, an endogenous gene, a transgene, or exogenous genes such as genes of a pathogen, for example a virus, which is present in the cell after infection thereof. The cell containing the target gene can be derived from or contained in any organism, for example a plant, animal, protozoan, virus, bacterium, or fungus. Non-limiting examples of plants include monocots, dicots, or gymnosperms. Non-limiting examples of animals include vertebrates or invertebrates. Non-limiting examples of fungi include molds or yeasts. For a review, see for example Snyder and Gerstein, 2003, Science, 300, 258-260.

[0403] By “non-canonical base pair” is meant any non-Watson Crick base pair, such as mismatches and/or wobble base pairs, including flipped mismatches, single hydrogen bond mismatches, trans-type mismatches, triple base interactions, and quadruple base interactions. Non-limiting examples of such non-canonical base pairs include, but are not limited to, AC reverse Hoogsteen, AC wobble, AU reverse Hoogsteen, GU wobble, AA N7 amino, CC 2-carbonyl-amino(H1)-N3-amino(H2), GA sheared, UC 4-carbonyl-amino, UU imino-carbonyl, AC reverse wobble, AU Hoogsteen, AU reverse Watson Crick, CG reverse Watson Crick, GC N3-amino-amino N3, AA N1-amino symmetric, AA N7-amino symmetric, GA N7-N1 amino-carbonyl, GA+carbonyl-amino N7-N1, GG N1-carbonyl symmetric, GG N3-amino symmetric, CC carbonyl-amino symmetric, CC N3-amino symmetric, UU 2-carbonyl-imino symmetric, UU 4-carbonyl-imino symmetric, AA amino-N3, AA N1-amino, AC amino 2-carbonyl, AC N3-amino, AC N7-amino, AU amino-4-carbonyl, AU N1-imino, AU N3-imino, AU N7-imino, CC carbonyl-amino, GA amino-N1, GA amino-N7, GA carbonyl-amino, GA N3-amino, GC amino-N3, GC carbonyl-amino, GC N3-amino, GC N7-amino, GG amino-N7, GG carbonyl-imino, GG N7-amino, GU amino-2-carbonyl, GU carbonyl-imino, GU imino-2-carbonyl, GU N7-imino, psiU imino-2-carbonyl, UC 4-carbonyl-amino, UC imino-carbonyl, UU imino-4-carbonyl, AC C2-H—N3, GA carbonyl-C2-H, UU imino-4-carbonyl 2 carbonyl-C5-H, AC amino(A) N3(C)-carbonyl, GC imino amino-carbonyl, Gpsi imino-2-carbonyl amino-2-carbonyl, and GU imino amino-2-carbonyl base pairs.

[0404] By “HCV” as used herein is meant, any hepatitis C virus or HCV protein, peptide, or polypeptide having HCV activity, such as encoded by HCV Genbank Accession Nos. shown in Table I. The term HCV also refers to nucleic acid sequences encoding any HCV protein, peptide, or polypeptide having HCV activity. The term “HCV” is also meant to include other HCV encoding sequence, such as other HCV isoforms, mutant HCV genes, splice variants of HCV genes, and HCV gene polymorphisms. In one embodiment, the term HCV as used herein refers to cellular or host proteins or polynucleotides encoding such proteins or that are otherwise involved in HCV infection and/or replication.

[0405] By “target” as used herein is meant, any target protein, peptide, or polypeptide, such as encoded by Genbank Accession Nos. herein and in U.S. Ser. No. 10/923,536 and U.S. Ser. No. 10/923,536, both incorporated by reference herein. The term “target” also refers to nucleic acid sequences or target polynucleotide sequence encoding any target protein, peptide, or polypeptide, such as proteins, peptides, or polypeptides encoded by sequences having Genbank Accession Nos. shown herein or in U.S. Provisional Patent Application No. 60/363,124, U.S. Ser. No. 10/923,536 and U.S. Ser. No. 10/923,536. The target of interest can include target polynucleotide sequences, such as target DNA or target RNA. The term “target” is also meant to include other sequences, such as differing isoforms, mutant target genes, splice variants of target polynucleotides, target polymorphisms, and non-coding (e.g., ncRNA, miRNA, sRNA) or other regulatory polynucleotide sequences as described herein. Therefore, in various embodiments of the invention, a double stranded nucleic acid molecule of the invention (e.g., siNA) having complementarity to a target RNA can be used to inhibit or down regulate miRNA or other ncRNA activity. In one embodiment, inhibition of miRNA or ncRNA activity can be used to down regulate or inhibit gene expression (e.g., gene targets described herein or otherwise known in the art) or viral replication (e.g., viral targets described herein or otherwise known in the art) that is dependent on miRNA or ncRNA activity. In another embodiment, inhibition of miRNA or ncRNA activity by double stranded nucleic acid molecules of the invention (e.g. siNA) having complementarity to the miRNA or ncRNA can be used to up regulate or promote target gene expression (e.g., gene targets described herein or otherwise known in the art) where the expression of such genes is down regulated, suppressed, or silenced by the miRNA or ncRNA. Such up-regulation of gene expression can be used to treat diseases and conditions associated with a loss of function or haploinsufficiency as are generally known in the art.

[0406] By “pathway target” or “host target” is meant any target involved in pathways of gene expression or activity or cellular or host proteins or polynucleotides encoding such proteins or that are otherwise involved in HCV infection and/or replication. For example, any given target can have related pathway or host targets that can include upstream, downstream, or modifier genes in a biologic pathway. These pathway and host target genes can provide additive or synergistic effects in the treatment of diseases, conditions, and traits herein.

[0407] In one embodiment, the target is any target RNA or a portion thereof.

[0408] In one embodiment, the target is any target DNA or a portion thereof.

[0409] In one embodiment, the target is any target mRNA or a portion thereof.

[0410] In one embodiment, the target is any target miRNA or a portion thereof.

[0411] In one embodiment, the target is any target siRNA or a portion thereof.

[0412] In one embodiment, the target is any target stRNA or a portion thereof.

[0413] In one embodiment, the target is a target and or pathway target or a portion thereof.

[0414] In one embodiment, the target is any (e.g., one or more) of target sequences described herein and/or in U.S. Provisional Patent Application No. 60/363,124, U.S. Ser. No. 10/923,536 and/or PCT/US03/05028, or a portion thereof. In one embodiment, the target is any (e.g., one or more) of target sequences shown in Tables I, II, or III or a portion thereof. In another embodiment, the target is a siRNA, miRNA, or stRNA corresponding to any (e.g., one or more) target, upper strand, or lower strand sequence shown in Table II or Table III or a portion thereof. In another embodiment, the target is any siRNA, miRNA, or stRNA corresponding any (e.g., one or more) sequence corresponding to a sequence herein or described in U.S. Provisional Patent Application No. 60/363,124, U.S. Ser. No. 10/923,536 and/or PCT/US03/05028.

[0415] By “homologous sequence” is meant, a nucleotide sequence that is shared by one or more polynucleotide sequences, such as genes, gene transcripts and/or non-coding polynucleotides. For example, a homologous sequence can be a nucleotide sequence that is shared by two or more genes encoding related but different proteins, such as different members of a gene family, different protein epitopes, different protein isoforms or completely divergent genes, such as a cytokine and its corresponding receptors. A homologous sequence can be a nucleotide sequence that is shared by two or more non-coding polynucleotides, such as noncoding DNA or RNA, regulatory sequences, introns, and sites of transcriptional control or regulation. Homologous sequences can also include conserved sequence regions shared by more than one polynucleotide sequence. Homology does not need to be perfect homology (e.g., 100%), as partially homologous sequences are also contemplated by the instant invention (e.g., 99%, 98%, 97%, 96%, 95%, 94%, 93%, 92%, 91%, 90%, 89%, 88%, 87%, 86%, 85%, 84%, 83%, 82%, 81%, 80% etc.).

[0416] By “conserved sequence region” is meant, a nucleotide sequence of one or more regions in a polynucleotide does not vary significantly between generations or from one biological system, subject, or organism to another biological system, subject, or organism. The polynucleotide can include both coding and non-coding DNA and RNA.

[0417] By “sense region” is meant a nucleotide sequence of a siNA molecule having complementarity to an antisense region of the siNA molecule. In addition, the sense region of a siNA molecule can comprise a nucleic acid sequence having homology with a target nucleic acid sequence. In one embodiment, the sense region of the siNA molecule is referred to as the sense strand or passenger strand.

[0418] By “antisense region” is meant a nucleotide sequence of a siNA molecule having complementarity to a target nucleic acid sequence. In addition, the antisense region of a siNA molecule can optionally comprise a nucleic acid sequence having complementarity to a sense region of the siNA molecule. In one embodiment, the antisense region of the siNA molecule is referred to as the antisense strand or guide strand.

[0419] By “target nucleic acid” or “target polynucleotide” is meant any nucleic acid sequence (e.g, any target and/or pathway target sequence) whose expression or activity is to be modulated. The target nucleic acid can be DNA or RNA. In one embodiment, a target nucleic acid of the invention is target RNA or DNA.

[0420] By “complementarity” is meant that a nucleic acid can form hydrogen bond(s) with another nucleic acid sequence by either traditional Watson-Crick or other non-traditional types as described herein. In one embodiment, a double stranded nucleic acid molecule of the invention, such as an siNA molecule, wherein each strand is between 15 and 30 nucleotides in length, comprises between about 10% and about 100% (e.g., about 10%, 20%, 30%, 40%, 50%, 60%, 70%, 80%, 90%, or 100%) complementarity between the two strands of the double stranded nucleic acid molecule. In another embodiment, a double stranded nucleic acid molecule of the invention, such as an siNA molecule, where one strand is the sense strand and the other stand is the antisense strand, wherein each strand is between 15 and 30 nucleotides in length, comprises between at least about 10% and about 100% (e.g., at least about 10%, 20%, 30%, 40%, 50%, 60%, 70%, 80%, 90%, or 100%) complementarity between the nucleotide sequence in the antisense strand of the double stranded nucleic acid molecule and the nucleotide sequence of its corresponding target nucleic acid molecule, such as a target RNA or target mRNA or viral RNA. In one embodiment, a double stranded nucleic acid molecule of the invention, such as an siNA molecule, where one strand comprises nucleotide sequence that is referred to as the sense region and the other strand comprises a nucleotide sequence that is referred to as the antisense region, wherein each strand is between 15 and 30 nucleotides in length, comprises between about 10% and about 100% (e.g., about 10%, 20%, 30%, 40%, 50%, 60%, 70%, 80%, 90%, or 100%) complementarity between the sense region and the antisense region of the double stranded nucleic acid molecule. In reference to the nucleic molecules of the present invention, the binding free energy for a nucleic acid molecule with its complementary sequence is sufficient to allow the relevant function of the nucleic acid to proceed, e.g., RNAi activity. Determination of binding free energies for nucleic acid molecules is well known in the art (see, e.g., Turner et al., 1987, CSH Symp. Quant. Biol. LII pp. 123-133; Frier et al., 1986, Proc. Nat. Acad. Sci. USA 83:9373-9377; Turner et al., 1987, J. Am. Chem. Soc. 109:3783-3785). A percent complementarity indicates the percentage of contiguous residues in a nucleic acid molecule that can form hydrogen bonds (e.g., Watson-Crick base pairing) with a second nucleic acid sequence (e.g., 5, 6, 7, 8, 9, or 10 nucleotides out of a total of 10 nucleotides in the first oligonucleotide being based paired to a second nucleic acid sequence having 10 nucleotides represents 50%, 60%, 70%, 80%, 90%, and 100% complementary respectively). In one embodiment, a siNA molecule of the invention has perfect complementarity between the sense strand or sense region and the antisense strand or antisense region of the siNA molecule. In one embodiment, a siNA molecule of the invention is perfectly complementary to a corresponding target nucleic acid molecule. “Perfectly complementary” means that all the contiguous residues of a nucleic acid sequence will hydrogen bond with the same number of contiguous residues in a second nucleic acid sequence. In one embodiment, a siNA molecule of the invention comprises about 15 to about 30 or more (e.g., about 15, 16, 17, 18, 19, 20, 21, 22, 23, 24, 25, 26, 27, 28, 29, or 30 or more) nucleotides that are complementary to one or more target nucleic acid molecules or a portion thereof. In one embodiment, a siNA molecule of the invention has partial complementarity (i.e., less than 100% complementarity) between the sense strand or sense region and the antisense strand or antisense region of the siNA molecule or between the antisense strand or antisense region of the siNA molecule and a corresponding target nucleic acid molecule. For example, partial complementarity can include various mismatches or non-based paired nucleotides (e.g., 1, 2, 3, 4, 5 or more mismatches or non-based paired nucleotides) within the siNA structure which can result in bulges, loops, or overhangs that result between the between the sense strand or sense region and the antisense strand or antisense region of the siNA molecule or between the antisense strand or antisense region of the siNA molecule and a corresponding target nucleic acid molecule.

[0421] In one embodiment, a double stranded nucleic acid molecule of the invention, such as siNA molecule, has perfect complementarity between the sense strand or sense region and the antisense strand or antisense region of the nucleic acid molecule. In one embodiment, double stranded nucleic acid molecule of the invention, such as siNA molecule, is perfectly complementary to a corresponding target nucleic acid molecule.

[0422] In one embodiment, double stranded nucleic acid molecule of the invention, such as siNA molecule, has partial complementarity (i.e., less than 100% complementarity) between the sense strand or sense region and the antisense strand or antisense region of the double stranded nucleic acid molecule or between the antisense strand or antisense region of the nucleic acid molecule and a corresponding target nucleic acid molecule. For example, partial complementarity can include various mismatches or non-base paired nucleotides (e.g., 1, 2, 3, 4, 5 or more mismatches or non-based paired nucleotides, such as nucleotide bulges) within the double stranded nucleic acid molecule, structure which can result in bulges, loops, or overhangs that result between the sense strand or sense region and the antisense strand or antisense region of the double stranded nucleic acid molecule or between the antisense strand or antisense region of the double stranded nucleic acid molecule and a corresponding target nucleic acid molecule.

[0423] In one embodiment, double stranded nucleic acid molecule of the invention is a microRNA (miRNA). By “microRNA” or “miRNA” is meant, a small double stranded RNA that regulates the expression of target messenger RNAs either by mRNA cleavage, translational repression/inhibition or heterochromatic silencing (see for example Ambros, 2004, Nature, 431, 350-355; Bartel, 2004, Cell, 116, 281-297; Cullen, 2004, Virus Research., 102, 3-9; He et al., 2004, Nat. Rev. genet., 5, 522-531; Ying et al., 2004, gene, 342, 25-28; and Sethupathy et al., 2006, RNA, 12:192-197). In one embodiment, the microRNA of the invention, has partial complementarity (i.e., less than 100% complementarity) between the sense strand or sense region and the antisense strand or antisense region of the miRNA molecule or between the antisense strand or antisense region of the miRNA and a corresponding target nucleic acid molecule. For example, partial complementarity can include various mismatches or non-base paired nucleotides (e.g., 1, 2, 3, 4, 5 or more mismatches or non-based paired nucleotides, such as nucleotide bulges) within the double stranded nucleic acid molecule, structure which can result in bulges, loops, or overhangs that result between the sense strand or sense region and the antisense strand or antisense region of the miRNA or between the antisense strand or antisense region of the miRNA and a corresponding target nucleic acid molecule.

[0424] In one embodiment, siNA molecules of the invention that down regulate or reduce target gene expression are used for treating, preventing or reducing HCV infection, liver failure, hepatocellular carcinoma, or cirrhosis in a subject or organism as described herein or otherwise known in the art.

[0425] In one embodiment of the present invention, each sequence of a siNA molecule of the invention is independently about 15 to about 30 nucleotides in length, in specific embodiments about 15, 16, 17, 18, 19, 20, 21, 22, 23, 24, 25, 26, 27, 28, 29, or 30 nucleotides in length. In another embodiment, the siNA duplexes of the invention independently comprise about 15 to about 30 base pairs (e.g., about 15, 16, 17, 18, 19, 20, 21, 22, 23, 24, 25, 26, 27, 28, 29, or 30). In another embodiment, one or more strands of the siNA molecule of the invention independently comprises about 15 to about 30 nucleotides (e.g., about 15, 16, 17, 18, 19, 20, 21, 22, 23, 24, 25, 26, 27, 28, 29, or 30) that are complementary to a target nucleic acid molecule. In yet another embodiment, siNA molecules of the invention comprising hairpin or circular structures are about 35 to about 55 (e.g., about 35, 40, 45, 50 or 55) nucleotides in length, or about 38 to about 44 (e.g., about 38, 39, 40, 41, 42, 43, or 44) nucleotides in length and comprising about 15 to about 25 (e.g., about 15, 16, 17, 18, 19, 20, 21, 22, 23, 24, or 25) base pairs. Exemplary siNA molecules of the invention are shown in Tables II and III and/or FIGS. 4-5.

[0426] As used herein “cell” is used in its usual biological sense, and does not refer to an entire multicellular organism, e.g., specifically does not refer to a human. The cell can be present in an organism, e.g., birds, plants and mammals such as humans, cows, sheep, apes, monkeys, swine, dogs, and cats. The cell can be prokaryotic (e.g., bacterial cell) or eukaryotic (e.g., mammalian or plant cell). The cell can be of somatic or germ line origin, totipotent or pluripotent, dividing or non-dividing. The cell can also be derived from or can comprise a gamete or embryo, a stem cell, or a fully differentiated cell. The cell can be an isolated cell, purified cell, or substantially purified cell as is generally recognized in the art.

[0427] The siNA molecules of the invention are added directly, or can be complexed with cationic lipids, packaged within liposomes, or otherwise delivered to target cells or tissues. The nucleic acid or nucleic acid complexes can be locally administered to relevant tissues ex vivo, or in vivo through local delivery to the lung, with or without their incorporation in biopolymers. In particular embodiments, the nucleic acid molecules of the invention comprise sequences shown in Tables II and III and/or FIGS. 4-5. Examples of such nucleic acid molecules consist essentially of sequences defined in these tables and figures. Furthermore, the chemically modified constructs described in Table IV and the lipid nanoparticle (LNP) formulations shown in Table VI can be applied to any siNA sequence or group of siNA sequences of the invention.

[0428] In another aspect, the invention provides mammalian cells containing one or more siNA molecules of this invention. The one or more siNA molecules can independently be targeted to the same or different sites within a target polynucleotide of the invention.

[0429] By “RNA” is meant a molecule comprising at least one ribonucleotide residue. By “ribonucleotide” is meant a nucleotide with a hydroxyl group at the 2′ position of a β-D-ribofuranose moiety. The terms include double-stranded RNA, single-stranded RNA, isolated RNA such as partially purified RNA, essentially pure RNA, synthetic RNA, recombinantly produced RNA, as well as altered RNA that differs from naturally occurring RNA by the addition, deletion, substitution and/or alteration of one or more nucleotides. Such alterations can include addition of non-nucleotide material, such as to the end(s) of the siNA or internally, for example at one or more nucleotides of the RNA. Nucleotides in the RNA molecules of the instant invention can also comprise non-standard nucleotides, such as non-naturally occurring nucleotides or chemically synthesized nucleotides or deoxynucleotides. These altered RNAs can be referred to as analogs or analogs of naturally-occurring RNA.

[0430] By “subject” is meant an organism, which is a donor or recipient of explanted cells or the cells themselves. “Subject” also refers to an organism to which the nucleic acid molecules of the invention can be administered. A subject can be a mammal or mammalian cells, including a human or human cells. In one embodiment, the subject is an infant (e.g., subjects that are less than 1 month old, or 1, 2, 3, 4, 5, 6, 7, 8, 9 10, 11, or 12 months old). In one embodiment, the subject is a toddler (e.g., 1, 2, 3, 4, 5 or 6 years old). In one embodiment, the subject is a senior (e.g., anyone over the age of about 65 years of age).

[0431] By “chemical modification” as used herein is meant any modification of chemical structure of the nucleotides that differs from nucleotides of native siRNA or RNA. The term “chemical modification” encompasses the addition, substitution, or modification of native siRNA or RNA nucleosides and nucleotides with modified nucleosides and modified nucleotides as described herein or as is otherwise known in the art. Non-limiting examples of such chemical modifications include without limitation compositions having any of Formulae I, II, III, IV, V, VI, or VII herein, phosphorothioate internucleotide linkages, 2′-deoxyribonucleotides, 2′-O-methyl ribonucleotides, 2′-deoxy-2′-fluoro ribonucleotides, 4′-thio ribonucleotides, 2′-O-trifluoromethyl nucleotides, 2′-O-ethyl-trifluoromethoxy nucleotides, 2′-O-difluoromethoxy-ethoxy nucleotides (see for example U.S. Ser. No. 10/981,966 filed Nov. 5, 2004, incorporated by reference herein), FANA, “universal base” nucleotides, “acyclic” nucleotides, 5-C-methyl nucleotides, terminal glyceryl and/or inverted deoxy abasic residue incorporation, or a modification having any of Formulae I-VII herein. In one embodiment, the nucleic acid molecules of the invention (e.g, dsRNA, siNA etc.) are partially modified (e.g., about 5%, 10,%, 15%, 20%, 25%, 30%, 35%, 40%, 45%, 50%, 55%, 60%, 65%, 70%, 75%, 80%, 85%, 90%, or 95% modified) with chemical modifications. In another embodiment, the nucleic acid molecules of the invention (e.g, dsRNA, siNA etc.) are completely modified (e.g., about 100% modified) with chemical modifications.

[0432] The term “phosphorothioate” as used herein refers to an internucleotide linkage having Formula I, wherein Z and/or W comprise a sulfur atom. Hence, the term phosphorothioate refers to both phosphorothioate and phosphorodithioate internucleotide linkages.

[0433] The term “phosphonoacetate” as used herein refers to an internucleotide linkage having Formula I, wherein Z and/or W comprise an acetyl or protected acetyl group.

[0434] The term “thiophosphonoacetate” as used herein refers to an internucleotide linkage having Formula I, wherein Z comprises an acetyl or protected acetyl group and W comprises a sulfur atom or alternately W comprises an acetyl or protected acetyl group and Z comprises a sulfur atom.

[0435] The term “universal base” as used herein refers to nucleotide base analogs that form base pairs with each of the natural DNA/RNA bases with little discrimination between them. Non-limiting examples of universal bases include C-phenyl, C-naphthyl and other aromatic derivatives, inosine, azole carboxamides, and nitroazole derivatives such as 3-nitropyrrole, 4-nitroindole, 5-nitroindole, and 6-nitroindole as known in the art (see for example Loakes, 2001, Nucleic Acids Research, 29, 2437-2447).

[0436] The term “acyclic nucleotide” as used herein refers to any nucleotide having an acyclic ribose sugar, for example where any of the ribose carbons (C1, C2, C3, C4, or C5), are independently or in combination absent from the nucleotide.

[0437] The nucleic acid molecules of the instant invention, individually, or in combination or in conjunction with other drugs, can be used to for preventing or treating diseases, disorders, conditions, and traits described herein or otherwise known in the art, in a subject or organism.

[0438] In one embodiment, the siNA molecules of the invention can be administered to a subject or can be administered to other appropriate cells evident to those skilled in the art, individually or in combination with one or more drugs under conditions suitable for the treatment.

[0439] In a further embodiment, the siNA molecules can be used in combination with other known treatments to prevent or treat diseases, disorders, or conditions in a subject or organism. For example, the described molecules could be used in combination with one or more known compounds, treatments, or procedures to prevent or treat diseases, disorders, conditions, and traits described herein in a subject or organism as are known in the art.

[0440] In one embodiment, the invention features an expression vector comprising a nucleic acid sequence encoding at least one siNA molecule of the invention, in a manner which allows expression of the siNA molecule. For example, the vector can contain sequence(s) encoding both strands of a siNA molecule comprising a duplex. The vector can also contain sequence(s) encoding a single nucleic acid molecule that is self-complementary and thus forms a siNA molecule. Non-limiting examples of such expression vectors are described in Paul et al., 2002, Nature Biotechnology, 19, 505; Miyagishi and Taira, 2002, Nature Biotechnology, 19, 497; Lee et al., 2002, Nature Biotechnology, 19, 500; and Novina et al., 2002, Nature Medicine, advance online publication doi:10.1038/nm725.

[0441] In another embodiment, the invention features a mammalian cell, for example, a human cell, including an expression vector of the invention.

[0442] In yet another embodiment, the expression vector of the invention comprises a sequence for a siNA molecule having complementarity to a RNA molecule referred to by a Genbank Accession numbers, for example Genbank Accession Nos. described herein or in U.S. Provisional Patent Application No. 60/363,124, U.S. Ser. No. 10/923,536 and/or PCT/US03/05028.

[0443] In one embodiment, an expression vector of the invention comprises a nucleic acid sequence encoding two or more siNA molecules, which can be the same or different.

[0444] In another aspect of the invention, siNA molecules that interact with target RNA molecules and down-regulate gene encoding target RNA molecules (for example target RNA molecules referred to by Genbank Accession numbers herein) are expressed from transcription units inserted into DNA or RNA vectors. The recombinant vectors can be DNA plasmids or viral vectors. siNA expressing viral vectors can be constructed based on, but not limited to, adeno-associated virus, retrovirus, adenovirus, or alphavirus. The recombinant vectors capable of expressing the siNA molecules can be delivered as described herein, and persist in target cells. Alternatively, viral vectors can be used that provide for transient expression of siNA molecules. Such vectors can be repeatedly administered as necessary. Once expressed, the siNA molecules bind and down-regulate gene function or expression via RNA interference (RNAi). Delivery of siNA expressing vectors can be systemic, such as by intravenous or intramuscular administration, by administration to target cells ex-planted from a subject followed by reintroduction into the subject, or by any other means that would allow for introduction into the desired target cell.

[0445] By “vectors” is meant any nucleic acid- and/or viral-based technique used to deliver a desired nucleic acid.

[0446] Other features and advantages of the invention will be apparent from the following description of the preferred embodiments thereof, and from the claims.

### BRIEF DESCRIPTION OF THE DRAWINGS

[0447] FIG. 1 shows a non-limiting example of a scheme for the synthesis of siNA molecules. The complementary siNA sequence strands, strand 1 and strand 2, are synthesized in tandem and are connected by a cleavable linkage, such as a nucleotide succinate or abasic succinate, which can be the same or different from the cleavable linker used for solid phase synthesis on a solid support. The synthesis can be either solid phase or solution phase, in the example shown, the synthesis is a solid phase synthesis. The synthesis is performed such that a protecting group, such as a dimethoxytrityl group, remains intact on the terminal nucleotide of the tandem oligonucleotide. Upon cleavage and deprotection of the oligonucleotide, the two siNA strands spontaneously hybridize to form a siNA duplex, which allows the purification of the duplex by utilizing the properties of the terminal protecting group, for example by applying a trityl on purification method wherein only duplexes/oligonucleotides with the terminal protecting group are isolated.

[0448] FIG. 2 shows a MALDI-TOF mass spectrum of a purified siNA duplex synthesized by a method of the invention. The two peaks shown correspond to the predicted mass of the separate siNA sequence strands. This result demonstrates that the siNA duplex generated from tandem synthesis can be purified as a single entity using a simple trityl-on purification methodology.

[0449] FIG. 3 shows a non-limiting proposed mechanistic representation of target RNA degradation involved in RNAi. Double-stranded RNA (dsRNA), which is generated by RNA-dependent RNA polymerase (RdRP) from foreign single-stranded RNA, for example viral, transposon, or other exogenous RNA, activates the DICER enzyme that in turn generates siNA duplexes. Alternately, synthetic or expressed siNA can be introduced directly into a cell by appropriate means. An active siNA complex forms which recognizes a target RNA, resulting in degradation of the target RNA by the RISC endonuclease complex or in the synthesis of additional RNA by RNA-dependent RNA polymerase (RdRP), which can activate DICER and result in additional siNA molecules, thereby amplifying the RNAi response.

[0450] FIG. 4A-F shows non-limiting examples of chemically-modified siNA constructs of the present invention. In the figure, N stands for any nucleotide (adenosine, guanosine, cytosine, uridine, or optionally thymidine, for example thymidine can be substituted in the overhanging regions designated by parenthesis (N N). Various modifications are shown for the sense and antisense strands of the siNA constructs. The (N N) nucleotide positions can be chemically modified as described herein (e.g., 2′-O-methyl, 2′-deoxy-2′-fluoro etc.) and can be either derived from a corresponding target nucleic acid sequence or not (see for example FIG. 6C). Furthermore, the sequences shown in FIG. 4 can optionally include a ribonucleotide at the 9^{th} position from the 5′-end of the sense strand or the 11^{th} position based on the 5′-end of the guide strand by counting 11 nucleotide positions in from the 5′-terminus of the guide strand (see FIG. 6C).

[0451] FIG. 4A: The sense strand comprises 21 nucleotides wherein the two terminal 3′-nucleotides are optionally base paired and wherein all nucleotides present are ribonucleotides except for (N N) nucleotides, which can comprise ribonucleotides, deoxynucleotides, universal bases, or other chemical modifications described herein. The antisense strand comprises 21 nucleotides, optionally having a 3′-terminal glyceryl moiety wherein the two terminal 3′-nucleotides are optionally complementary to the target RNA sequence, and wherein all nucleotides present are ribonucleotides except for (N N) nucleotides, which can comprise ribonucleotides, deoxynucleotides, universal bases, or other chemical modifications described herein. A modified internucleotide linkage, such as a phosphorothioate, phosphorodithioate or other modified internucleotide linkage as described herein, shown as “s”, optionally connects the (N N) nucleotides in the antisense strand.

[0452] FIG. 4B: The sense strand comprises 21 nucleotides wherein the two terminal 3′-nucleotides are optionally base paired and wherein all pyrimidine nucleotides that may be present are 2′deoxy-2′-fluoro modified nucleotides and all purine nucleotides that may be present are 2′-O-methyl modified nucleotides except for (N N) nucleotides, which can comprise ribonucleotides, deoxynucleotides, universal bases, or other chemical modifications described herein. The antisense strand comprises 21 nucleotides, optionally having a 3′-terminal glyceryl moiety and wherein the two terminal 3′-nucleotides are optionally complementary to the target RNA sequence, and wherein all pyrimidine nucleotides that may be present are 2′-deoxy-2′-fluoro modified nucleotides and all purine nucleotides that may be present are 2′-O-methyl modified nucleotides except for (N N) nucleotides, which can comprise ribonucleotides, deoxynucleotides, universal bases, or other chemical modifications described herein. A modified internucleotide linkage, such as a phosphorothioate, phosphorodithioate or other modified internucleotide linkage as described herein, shown as “s”, optionally connects the (N N) nucleotides in the sense and antisense strand.

[0453] FIG. 4C: The sense strand comprises 21 nucleotides having 5′- and 3′-terminal cap moieties wherein the two terminal 3′-nucleotides are optionally base paired and wherein all pyrimidine nucleotides that may be present are 2′-O-methyl or 2′-deoxy-2′-fluoro modified nucleotides except for (N N) nucleotides, which can comprise ribonucleotides, deoxynucleotides, universal bases, or other chemical modifications described herein. The antisense strand comprises 21 nucleotides, optionally having a 3′-terminal glyceryl moiety and wherein the two terminal 3′-nucleotides are optionally complementary to the target RNA sequence, and wherein all pyrimidine nucleotides that may be present are 2′-deoxy-2′-fluoro modified nucleotides except for (N N) nucleotides, which can comprise ribonucleotides, deoxynucleotides, universal bases, or other chemical modifications described herein. A modified internucleotide linkage, such as a phosphorothioate, phosphorodithioate or other modified internucleotide linkage as described herein, shown as “s”, optionally connects the (N N) nucleotides in the antisense strand.

[0454] FIG. 4D: The sense strand comprises 21 nucleotides having 5′- and 3′-terminal cap moieties wherein the two terminal 3′-nucleotides are optionally base paired and wherein all pyrimidine nucleotides that may be present are 2′-deoxy-2′-fluoro modified nucleotides except for (N N) nucleotides, which can comprise ribonucleotides, deoxynucleotides, universal bases, or other chemical modifications described herein and wherein and all purine nucleotides that may be present are 2′-deoxy nucleotides. The antisense strand comprises 21 nucleotides, optionally having a 3′-terminal glyceryl moiety and wherein the two terminal 3′-nucleotides are optionally complementary to the target RNA sequence, wherein all pyrimidine nucleotides that may be present are 2′-deoxy-2′-fluoro modified nucleotides and all purine nucleotides that may be present are 2′-O-methyl modified nucleotides except for (N N) nucleotides, which can comprise ribonucleotides, deoxynucleotides, universal bases, or other chemical modifications described herein. A modified internucleotide linkage, such as a phosphorothioate, phosphorodithioate or other modified internucleotide linkage as described herein, shown as “s”, optionally connects the (N N) nucleotides in the antisense strand.

[0455] FIG. 4E: The sense strand comprises 21 nucleotides having 5′- and 3′-terminal cap moieties wherein the two terminal 3′-nucleotides are optionally base paired and wherein all pyrimidine nucleotides that may be present are 2′-deoxy-2′-fluoro modified nucleotides except for (N N) nucleotides, which can comprise ribonucleotides, deoxynucleotides, universal bases, or other chemical modifications described herein. The antisense strand comprises 21 nucleotides, optionally having a 3′-terminal glyceryl moiety and wherein the two terminal 3′-nucleotides are optionally complementary to the target RNA sequence, and wherein all pyrimidine nucleotides that may be present are 2′-deoxy-2′-fluoro modified nucleotides and all purine nucleotides that may be present are 2′-O-methyl modified nucleotides except for (N N) nucleotides, which can comprise ribonucleotides, deoxynucleotides, universal bases, or other chemical modifications described herein. A modified internucleotide linkage, such as a phosphorothioate, phosphorodithioate or other modified internucleotide linkage as described herein, shown as “s”, optionally connects the (N N) nucleotides in the antisense strand.

[0456] FIG. 4F: The sense strand comprises 21 nucleotides having 5′- and 3′-terminal cap moieties wherein the two terminal 3′-nucleotides are optionally base paired and wherein all pyrimidine nucleotides that may be present are 2′-deoxy-2′-fluoro modified nucleotides except for (N N) nucleotides, which can comprise ribonucleotides, deoxynucleotides, universal bases, or other chemical modifications described herein and wherein and all purine nucleotides that may be present are 2′-deoxy nucleotides. The antisense strand comprises 21 nucleotides, optionally having a 3′-terminal glyceryl moiety and wherein the two terminal 3′-nucleotides are optionally complementary to the target RNA sequence, and having one 3′-terminal phosphorothioate internucleotide linkage and wherein all pyrimidine nucleotides that may be present are 2′-deoxy-2′-fluoro modified nucleotides and all purine nucleotides that may be present are 2′-deoxy nucleotides except for (N N) nucleotides, which can comprise ribonucleotides, deoxynucleotides, universal bases, or other chemical modifications described herein. A modified internucleotide linkage, such as a phosphorothioate, phosphorodithioate or other modified internucleotide linkage as described herein, shown as “s”, optionally connects the (N N) nucleotides in the antisense strand. The antisense strand of constructs A-F comprise sequence complementary to any target nucleic acid sequence of the invention. Furthermore, when a glyceryl moiety (L) is present at the 3′-end of the antisense strand for any construct shown in FIG. 4 A-F, the modified internucleotide linkage is optional.

[0457] FIG. 5A-F shows non-limiting examples of specific chemically-modified siNA sequences of the invention. A-F applies the chemical modifications described in FIG. 4A-F to an exemplary HCV siNA sequence. Such chemical modifications can be applied to any siNA sequence for any target. Furthermore, the sequences shown in FIG. 5 can optionally include a ribonucleotide at the 9^{th} position from the 5′-end of the sense strand or the 11^{th} position based on the 5′-end of the guide strand by counting 11 nucleotide positions in from the 5′-terminus of the guide strand (see FIG. 6C). In addition, the sequences shown in FIG. 5 can optionally include terminal ribonucleotides at up to about 4 positions at the 5′-end of the antisense strand (e.g., about 1, 2, 3, or 4 terminal ribonucleotides at the 5′-end of the antisense strand).

[0458] FIG. 6A-C shows non-limiting examples of different siNA constructs of the invention.

[0459] The examples shown in FIG. 6A (constructs 1, 2, and 3) have 19 representative base pairs; however, different embodiments of the invention include any number of base pairs described herein. Bracketed regions represent nucleotide overhangs, for example, comprising about 1, 2, 3, or 4 nucleotides in length, preferably about 2 nucleotides. Constructs 1 and 2 can be used independently for RNAi activity. Construct 2 can comprise a polynucleotide or non-nucleotide linker, which can optionally be designed as a biodegradable linker. In one embodiment, the loop structure shown in construct 2 can comprise a biodegradable linker that results in the formation of construct 1 in vivo and/or in vitro. In another example, construct 3 can be used to generate construct 2 under the same principle wherein a linker is used to generate the active siNA construct 2 in vivo and/or in vitro, which can optionally utilize another biodegradable linker to generate the active siNA construct 1 in vivo and/or in vitro. As such, the stability and/or activity of the siNA constructs can be modulated based on the design of the siNA construct for use in vivo or in vitro and/or in vitro.

[0460] The examples shown in FIG. 6B represent different variations of double stranded nucleic acid molecule of the invention, such as microRNA, that can include overhangs, bulges, loops, and stem-loops resulting from partial complementarity. Such motifs having bulges, loops, and stem-loops are generally characteristics of miRNA. The bulges, loops, and stem-loops can result from any degree of partial complementarity, such as mismatches or bulges of about 1, 2, 3, 4, 5, 6, 7, 8, 9, 10 or more nucleotides in one or both strands of the double stranded nucleic acid molecule of the invention.

[0461] The example shown in FIG. 6C represents a model double stranded nucleic acid molecule of the invention comprising a 19 base pair duplex of two 21 nucleotide sequences having dinucleotide 3′-overhangs. The top strand (1) represents the sense strand (passenger strand), the middle strand (2) represents the antisense (guide strand), and the lower strand (3) represents a target polynucleotide sequence. The dinucleotide overhangs (NN) can comprise sequence derived from the target polynucleotide. For example, the 3′-(NN) sequence in the guide strand can be complementary to the 5′-[NN] sequence of the target polynucleotide. In addition, the 5′-(NN) sequence of the passenger strand can comprise the same sequence as the 5′-[NN] sequence of the target polynucleotide sequence. In other embodiments, the overhangs (NN) are not derived from the target polynucleotide sequence, for example where the 3′-(NN) sequence in the guide strand are not complementary to the 5′-[NN] sequence of the target polynucleotide and the 5′-(NN) sequence of the passenger strand can comprise different sequence from the 5′-[NN] sequence of the target polynucleotide sequence. In additional embodiments, any (NN) nucleotides are chemically modified, e.g., as 2′-O-methyl, 2′-deoxy-2′-fluoro, and/or other modifications herein. Furthermore, the passenger strand can comprise a ribonucleotide position N of the passenger strand. For the representative 19 base pair 21 mer duplex shown, position N can be 9 nucleotides in from the 3′ end of the passenger strand. However, in duplexes of differing length, the position N is determined based on the 5′-end of the guide strand by counting 11 nucleotide positions in from the 5′-terminus of the guide strand and picking the corresponding base paired nucleotide in the passenger strand. Cleavage by Ago2 takes place between positions 10 and 11 as indicated by the arrow. In additional embodiments, there are two ribonucleotides, NN, at positions 10 and 11 based on the 5′-end of the guide strand by counting 10 and 11 nucleotide positions in from the 5′-terminus of the guide strand and picking the corresponding base paired nucleotides in the passenger strand.

[0462] FIG. 7A-C is a diagrammatic representation of a scheme utilized in generating an expression cassette to generate siNA hairpin constructs.

[0463] FIG. 7A: A DNA oligomer is synthesized with a 5′-restriction site (R1) sequence followed by a region having sequence identical (sense region of siNA) to a predetermined target sequence, wherein the sense region comprises, for example, about 19, 20, 21, or 22 nucleotides (N) in length, which is followed by a loop sequence of defined sequence (X), comprising, for example, about 3 to about 10 nucleotides.

[0464] FIG. 7B: The synthetic construct is then extended by DNA polymerase to generate a hairpin structure having self-complementary sequence that will result in a siNA transcript having specificity for a target sequence and having self-complementary sense and antisense regions.

[0465] FIG. 7C: The construct is heated (for example to about 95° C.) to linearize the sequence, thus allowing extension of a complementary second DNA strand using a primer to the 3′-restriction sequence of the first strand. The double-stranded DNA is then inserted into an appropriate vector for expression in cells. The construct can be designed such that a 3′-terminal nucleotide overhang results from the transcription, for example, by engineering restriction sites and/or utilizing a poly-U termination region as described in Paul et al., 2002, Nature Biotechnology, 29, 505-508.

[0466] FIG. 8A-C is a diagrammatic representation of a scheme utilized in generating an expression cassette to generate double-stranded siNA constructs.

[0467] FIG. 8A: A DNA oligomer is synthesized with a 5′-restriction (R1) site sequence followed by a region having sequence identical (sense region of siNA) to a predetermined target sequence, wherein the sense region comprises, for example, about 19, 20, 21, or 22 nucleotides (N) in length, and which is followed by a 3′-restriction site (R2) which is adjacent to a loop sequence of defined sequence (X).

[0468] FIG. 8B: The synthetic construct is then extended by DNA polymerase to generate a hairpin structure having self-complementary sequence.

[0469] FIG. 8C: The construct is processed by restriction enzymes specific to R1 and R2 to generate a double-stranded DNA which is then inserted into an appropriate vector for expression in cells. The transcription cassette is designed such that a U6 promoter region flanks each side of the dsDNA which generates the separate sense and antisense strands of the siNA. Poly T termination sequences can be added to the constructs to generate U overhangs in the resulting transcript.

[0470] FIG. 9A-E is a diagrammatic representation of a method used to determine target sites for siNA mediated RNAi within a particular target nucleic acid sequence, such as messenger RNA.

[0471] FIG. 9A: A pool of siNA oligonucleotides are synthesized wherein the antisense region of the siNA constructs has complementarity to target sites across the target nucleic acid sequence, and wherein the sense region comprises sequence complementary to the antisense region of the siNA.

[0472] FIGS. 9B&C: (FIG. 9B) The sequences are pooled and are inserted into vectors such that (FIG. 9C) transfection of a vector into cells results in the expression of the siNA.

[0473] FIG. 9D: Cells are sorted based on phenotypic change that is associated with modulation of the target nucleic acid sequence.

[0474] FIG. 9E: The siNA is isolated from the sorted cells and is sequenced to identify efficacious target sites within the target nucleic acid sequence.

[0475] FIG. 10 shows non-limiting examples of different stabilization chemistries (1-10) that can be used, for example, to stabilize the 3′-end of siNA sequences of the invention, including (1) [3-3′]-inverted deoxyribose; (2) deoxyribonucleotide; (3) [5′-3′]-3′-deoxyribonucleotide; (4) [5′-3′]-ribonucleotide; (5) [5′-3′]-3′-O-methyl ribonucleotide; (6) 3′-glyceryl; (7) [3′-5′]-3′-deoxyribonucleotide; (8) [3′-3′]-deoxyribonucleotide; (9) [5′-2′]-deoxyribonucleotide; and (10) [5-3′]-dideoxyribonucleotide. In addition to modified and unmodified backbone chemistries indicated in the figure, these chemistries can be combined with different backbone modifications as described herein, for example, backbone modifications having Formula I. In addition, the 2′-deoxy nucleotide shown 5′ to the terminal modifications shown can be another modified or unmodified nucleotide or non-nucleotide described herein, for example modifications having any of Formulae I-VII or any combination thereof.

[0476] FIG. 11 shows a non-limiting example of a strategy used to identify chemically modified siNA constructs of the invention that are nuclease resistant while preserving the ability to mediate RNAi activity. Chemical modifications are introduced into the siNA construct based on educated design parameters (e.g. introducing 2′-modifications, base modifications, backbone modifications, terminal cap modifications etc). The modified construct in tested in an appropriate system (e.g. human serum for nuclease resistance, shown, or an animal model for PK/delivery parameters). In parallel, the siNA construct is tested for RNAi activity, for example in a cell culture system such as a luciferase reporter assay). Lead siNA constructs are then identified which possess a particular characteristic while maintaining RNAi activity, and can be further modified and assayed once again. This same approach can be used to identify siNA-conjugate molecules with improved pharmacokinetic profiles, delivery, and RNAi activity.

[0477] FIG. 12 shows non-limiting examples of phosphorylated siNA molecules of the invention, including linear and duplex constructs and asymmetric derivatives thereof.

[0478] FIG. 13 shows non-limiting examples of chemically modified terminal phosphate groups of the invention.

[0479] FIG. 14A shows a non-limiting example of methodology used to design self complementary DFO constructs utilizing palindrome and/or repeat nucleic acid sequences that are identified in a target nucleic acid sequence. (i) A palindrome or repeat sequence is identified in a nucleic acid target sequence. (ii) A sequence is designed that is complementary to the target nucleic acid sequence and the palindrome sequence. (iii) An inverse repeat sequence of the non-palindrome/repeat portion of the complementary sequence is appended to the 3′-end of the complementary sequence to generate a self complementary DFO molecule comprising sequence complementary to the nucleic acid target. (iv) The DFO molecule can self-assemble to form a double stranded oligonucleotide. FIG. 14B shows a non-limiting representative example of a duplex forming oligonucleotide sequence. FIG. 14C shows a non-limiting example of the self assembly schematic of a representative duplex forming oligonucleotide sequence. FIG. 14D shows a non-limiting example of the self assembly schematic of a representative duplex forming oligonucleotide sequence followed by interaction with a target nucleic acid sequence resulting in modulation of gene expression.

[0480] FIG. 15 shows a non-limiting example of the design of self complementary DFO constructs utilizing palindrome and/or repeat nucleic acid sequences that are incorporated into the DFO constructs that have sequence complementary to any target nucleic acid sequence of interest. Incorporation of these palindrome/repeat sequences allow the design of DFO constructs that form duplexes in which each strand is capable of mediating modulation of target gene expression, for example by RNAi. First, the target sequence is identified. A complementary sequence is then generated in which nucleotide or non-nucleotide modifications (shown as X or Y) are introduced into the complementary sequence that generate an artificial palindrome (shown as XYXYXY in the Figure). An inverse repeat of the non-palindrome/repeat complementary sequence is appended to the 3′-end of the complementary sequence to generate a self complementary DFO comprising sequence complementary to the nucleic acid target. The DFO can self-assemble to form a double stranded oligonucleotide.

[0481] FIG. 16 shows non-limiting examples of multifunctional siNA molecules of the invention comprising two separate polynucleotide sequences that are each capable of mediating RNAi directed cleavage of differing target nucleic acid sequences. FIG. 16A shows a non-limiting example of a multifunctional siNA molecule having a first region that is complementary to a first target nucleic acid sequence (complementary region 1) and a second region that is complementary to a second target nucleic acid sequence (complementary region 2), wherein the first and second complementary regions are situated at the 3′-ends of each polynucleotide sequence in the multifunctional siNA. The dashed portions of each polynucleotide sequence of the multifunctional siNA construct have complementarity with regard to corresponding portions of the siNA duplex, but do not have complementarity to the target nucleic acid sequences. FIG. 16B shows a non-limiting example of a multifunctional siNA molecule having a first region that is complementary to a first target nucleic acid sequence (complementary region 1) and a second region that is complementary to a second target nucleic acid sequence (complementary region 2), wherein the first and second complementary regions are situated at the 5′-ends of each polynucleotide sequence in the multifunctional siNA. The dashed portions of each polynucleotide sequence of the multifunctional siNA construct have complementarity with regard to corresponding portions of the siNA duplex, but do not have complementarity to the target nucleic acid sequences.

[0482] FIG. 17 shows non-limiting examples of multifunctional siNA molecules of the invention comprising a single polynucleotide sequence comprising distinct regions that are each capable of mediating RNAi directed cleavage of differing target nucleic acid sequences. FIG. 17A shows a non-limiting example of a multifunctional siNA molecule having a first region that is complementary to a first target nucleic acid sequence (complementary region 1) and a second region that is complementary to a second target nucleic acid sequence (complementary region 2), wherein the second complementary region is situated at the 3′-end of the polynucleotide sequence in the multifunctional siNA. The dashed portions of each polynucleotide sequence of the multifunctional siNA construct have complementarity with regard to corresponding portions of the siNA duplex, but do not have complementarity to the target nucleic acid sequences. FIG. 17B shows a non-limiting example of a multifunctional siNA molecule having a first region that is complementary to a first target nucleic acid sequence (complementary region 1) and a second region that is complementary to a second target nucleic acid sequence (complementary region 2), wherein the first complementary region is situated at the 5′-end of the polynucleotide sequence in the multifunctional siNA. The dashed portions of each polynucleotide sequence of the multifunctional siNA construct have complementarity with regard to corresponding portions of the siNA duplex, but do not have complementarity to the target nucleic acid sequences. In one embodiment, these multifunctional siNA constructs are processed in vivo or in vitro to generate multifunctional siNA constructs as shown in FIG. 16.

[0483] FIG. 18 shows non-limiting examples of multifunctional siNA molecules of the invention comprising two separate polynucleotide sequences that are each capable of mediating RNAi directed cleavage of differing target nucleic acid sequences and wherein the multifunctional siNA construct further comprises a self complementary, palindrome, or repeat region, thus enabling shorter bifunctional siNA constructs that can mediate RNA interference against differing target nucleic acid sequences. FIG. 18A shows a non-limiting example of a multifunctional siNA molecule having a first region that is complementary to a first target nucleic acid sequence (complementary region 1) and a second region that is complementary to a second target nucleic acid sequence (complementary region 2), wherein the first and second complementary regions are situated at the 3′-ends of each polynucleotide sequence in the multifunctional siNA, and wherein the first and second complementary regions further comprise a self complementary, palindrome, or repeat region. The dashed portions of each polynucleotide sequence of the multifunctional siNA construct have complementarity with regard to corresponding portions of the siNA duplex, but do not have complementarity to the target nucleic acid sequences. FIG. 18B shows a non-limiting example of a multifunctional siNA molecule having a first region that is complementary to a first target nucleic acid sequence (complementary region 1) and a second region that is complementary to a second target nucleic acid sequence (complementary region 2), wherein the first and second complementary regions are situated at the 5′-ends of each polynucleotide sequence in the multifunctional siNA, and wherein the first and second complementary regions further comprise a self complementary, palindrome, or repeat region. The dashed portions of each polynucleotide sequence of the multifunctional siNA construct have complementarity with regard to corresponding portions of the siNA duplex, but do not have complementarity to the target nucleic acid sequences.

[0484] FIG. 19 shows non-limiting examples of multifunctional siNA molecules of the invention comprising a single polynucleotide sequence comprising distinct regions that are each capable of mediating RNAi directed cleavage of differing target nucleic acid sequences and wherein the multifunctional siNA construct further comprises a self complementary, palindrome, or repeat region, thus enabling shorter bifunctional siNA constructs that can mediate RNA interference against differing target nucleic acid sequences. FIG. 19A shows a non-limiting example of a multifunctional siNA molecule having a first region that is complementary to a first target nucleic acid sequence (complementary region 1) and a second region that is complementary to a second target nucleic acid sequence (complementary region 2), wherein the second complementary region is situated at the 3′-end of the polynucleotide sequence in the multifunctional siNA, and wherein the first and second complementary regions further comprise a self complementary, palindrome, or repeat region. The dashed portions of each polynucleotide sequence of the multifunctional siNA construct have complementarity with regard to corresponding portions of the siNA duplex, but do not have complementarity to the target nucleic acid sequences. FIG. 19B shows a non-limiting example of a multifunctional siNA molecule having a first region that is complementary to a first target nucleic acid sequence (complementary region 1) and a second region that is complementary to a second target nucleic acid sequence (complementary region 2), wherein the first complementary region is situated at the 5′-end of the polynucleotide sequence in the multifunctional siNA, and wherein the first and second complementary regions further comprise a self complementary, palindrome, or repeat region. The dashed portions of each polynucleotide sequence of the multifunctional siNA construct have complementarity with regard to corresponding portions of the siNA duplex, but do not have complementarity to the target nucleic acid sequences. In one embodiment, these multifunctional siNA constructs are processed in vivo or in vitro to generate multifunctional siNA constructs as shown in FIG. 18.

[0485] FIG. 20 shows a non-limiting example of how multifunctional siNA molecules of the invention can target two separate target nucleic acid molecules, such as separate RNA molecules encoding differing proteins (e.g., any of targets herein), for example, a cytokine and its corresponding receptor, differing viral strains, a virus and a cellular protein involved in viral infection or replication, or differing proteins involved in a common or divergent biologic pathway that is implicated in the maintenance of progression of disease. Each strand of the multifunctional siNA construct comprises a region having complementarity to separate target nucleic acid molecules. The multifunctional siNA molecule is designed such that each strand of the siNA can be utilized by the RISC complex to initiate RNA interference mediated cleavage of its corresponding target. These design parameters can include destabilization of each end of the siNA construct (see for example Schwarz et al., 2003, Cell, 115, 199-208). Such destabilization can be accomplished for example by using guanosine-cytidine base pairs, alternate base pairs (e.g., wobbles), or destabilizing chemically modified nucleotides at terminal nucleotide positions as is known in the art.

[0486] FIG. 21 shows a non-limiting example of how multifunctional siNA molecules of the invention can target two separate target nucleic acid sequences within the same target nucleic acid molecule, such as alternate coding regions of a RNA, coding and non-coding regions of a RNA, or alternate splice variant regions of a RNA. Each strand of the multifunctional siNA construct comprises a region having complementarity to the separate regions of the target nucleic acid molecule. The multifunctional siNA molecule is designed such that each strand of the siNA can be utilized by the RISC complex to initiate RNA interference mediated cleavage of its corresponding target region. These design parameters can include destabilization of each end of the siNA construct (see for example Schwarz et al., 2003, Cell, 115, 199-208). Such destabilization can be accomplished for example by using guanosine-cytidine base pairs, alternate base pairs (e.g., wobbles), or destabilizing chemically modified nucleotides at terminal nucleotide positions as is known in the art.

[0487] FIG. 22(A-H) shows non-limiting examples of tethered multifunctional siNA constructs of the invention. In the examples shown, a linker (e.g., nucleotide or non-nucleotide linker) connects two siNA regions (e.g., two sense, two antisense, or alternately a sense and an antisense region together. Separate sense (or sense and antisense) sequences corresponding to a first target sequence and second target sequence are hybridized to their corresponding sense and/or antisense sequences in the multifunctional siNA. In addition, various conjugates, ligands, aptamers, polymers or reporter molecules can be attached to the linker region for selective or improved delivery and/or pharmacokinetic properties.

[0488] FIG. 23 shows a non-limiting example of various dendrimer based multifunctional siNA designs.

[0489] FIG. 24 shows a non-limiting example of various supramolecular multifunctional siNA designs.

[0490] FIG. 25 shows a non-limiting example of a dicer enabled multifunctional siNA design using a 30 nucleotide precursor siNA construct. A 30 base pair duplex is cleaved by Dicer into 22 and 8 base pair products from either end (8 b.p. fragments not shown). For ease of presentation the overhangs generated by dicer are not shown—but can be compensated for. Three targeting sequences are shown. The required sequence identity overlapped is indicated by grey boxes. The N's of the parent 30 b.p. siNA are suggested sites of 2′-OH positions to enable Dicer cleavage if this is tested in stabilized chemistries. Note that processing of a 30mer duplex by Dicer RNase III does not give a precise 22+8 cleavage, but rather produces a series of closely related products (with 22+8 being the primary site). Therefore, processing by Dicer will yield a series of active siNAs.

[0491] FIG. 26 shows a non-limiting example of a dicer enabled multifunctional siNA design using a 40 nucleotide precursor siNA construct. A 40 base pair duplex is cleaved by Dicer into 20 base pair products from either end. For ease of presentation the overhangs generated by dicer are not shown—but can be compensated for. Four targeting sequences are shown. The target sequences having homology are enclosed by boxes. This design format can be extended to larger RNAs. If chemically stabilized siNAs are bound by Dicer, then strategically located ribonucleotide linkages can enable designer cleavage products that permit our more extensive repertoire of multiifunctional designs. For example cleavage products not limited to the Dicer standard of approximately 22-nucleotides can allow multifunctional siNA constructs with a target sequence identity overlap ranging from, for example, about 3 to about 15 nucleotides.

[0492] FIG. 27 shows a non-limiting example of additional multifunctional siNA construct designs of the invention. In one example, a conjugate, ligand, aptamer, label, or other moiety is attached to a region of the multifunctional siNA to enable improved delivery or pharmacokinetic profiling.

[0493] FIG. 28 shows a non-limiting example of additional multifunctional siNA construct designs of the invention. In one example, a conjugate, ligand, aptamer, label, or other moiety is attached to a region of the multifunctional siNA to enable improved delivery or pharmacokinetic profiling.

[0494] FIG. 29 shows a non-limiting example of a cholesterol linked phosphoramidite that can be used to synthesize cholesterol conjugated siNA molecules of the invention. An example is shown with the cholesterol moiety linked to the 5′-end of the sense strand of a siNA molecule.

[0495] FIG. 30 shows a non-limiting example of a double stranded nucleic acid molecule cocktail formulation targeting GBV-B in a marmoset model of HCV infection. GBV-B provides a small animal model for testing antiviral compounds and vaccines for HCV infection. Two animals were inoculated with GBV-B and IV treatment with the active formulated siNA (Sirna Compound Nos. 33149/47677 and 31703/38756, Formulation LNP-086; see Tables III and VI) at 3 mg/kg was initiated one day post infection. Another 2 animals were inoculated with GBV-B and were untreated to serve as negative controls. The animals were monitored to determine the effect of the therapy of GBV-B infection. Blood draws were performed over the course of the study to determine viral titers. Dosing of formulated siNA in the treated animals was repeated at days 1, 3, and 7 after inoculation at day 0. As shown in the figure, these animals show a profound inhibition of GBV-B over a three week time course compared to the untreated control animals.

[0496] FIG. 31 shows a non-limiting example of inhibition of GBV infection in an animal with established GBV infection that was treated with active formulated siNA (Sirna Compound Nos. 33149/47677 and 31703/38756, Formulation LNP-086; see Tables III and VI) at days 28, 31, and 35 post infection. This animal showed a decrease in viral titer down to the limit of detection following the dosing of active compound compared to historic untreated controls.

### DETAILED DESCRIPTION OF THE INVENTION

### Mechanism of Action of Nucleic Acid Molecules of the Invention

[0497] The discussion that follows discusses the proposed mechanism of RNA interference mediated by short interfering RNA as is presently known, and is not meant to be limiting and is not an admission of prior art. Applicant demonstrates herein that chemically-modified short interfering nucleic acids possess similar or improved capacity to mediate RNAi as do siRNA molecules and are expected to possess improved stability and activity in vivo; therefore, this discussion is not meant to be limiting only to siRNA and can be applied to siNA as a whole. By “improved capacity to mediate RNAi” or “improved RNAi activity” is meant to include RNAi activity measured in vitro and/or in vivo where the RNAi activity is a reflection of both the ability of the siNA to mediate RNAi and the stability of the siNAs of the invention. In this invention, the product of these activities can be increased in vitro and/or in vivo compared to an all RNA siRNA or a siNA containing a plurality of ribonucleotides. In some cases, the activity or stability of the siNA molecule can be decreased (i.e., less than ten-fold), but the overall activity of the siNA molecule is enhanced in vitro and/or in vivo.

[0498] RNA interference refers to the process of sequence specific post-transcriptional gene silencing in animals mediated by short interfering RNAs (siRNAs) (Fire et al., 1998, Nature, 391, 806). The corresponding process in plants is commonly referred to as post-transcriptional gene silencing or RNA silencing and is also referred to as quelling in fungi. The process of post-transcriptional gene silencing is thought to be an evolutionarily-conserved cellular defense mechanism used to prevent the expression of foreign genes which is commonly shared by diverse flora and phyla (Fire et al., 1999, Trends genet., 15, 358). Such protection from foreign gene expression may have evolved in response to the production of double-stranded RNAs (dsRNAs) derived from viral infection or the random integration of transposon elements into a host genome via a cellular response that specifically destroys homologous single-stranded RNA or viral genomic RNA. The presence of dsRNA in cells triggers the RNAi response though a mechanism that has yet to be fully characterized. This mechanism appears to be different from the interferon response that results from dsRNA-mediated activation of protein kinase PKR and 2′,5′-oligoadenylate synthetase resulting in non-specific cleavage of mRNA by ribonuclease L.

[0499] The presence of long dsRNAs in cells stimulates the activity of a ribonuclease III enzyme referred to as Dicer. Dicer is involved in the processing of the dsRNA into short pieces of dsRNA known as short interfering RNAs (siRNAs) (Berstein et al., 2001, Nature, 409, 363). Short interfering RNAs derived from Dicer activity are typically about 21 to about 23 nucleotides in length and comprise about 19 base pair duplexes. Dicer has also been implicated in the excision of 21- and 22-nucleotide small temporal RNAs (stRNAs) from precursor RNA of conserved structure that are implicated in translational control (Hutvagner et al., 2001, Science, 293, 834). The RNAi response also features an endonuclease complex containing a siRNA, commonly referred to as an RNA-induced silencing complex (RISC), which mediates cleavage of single-stranded RNA having sequence homologous to the siRNA. Cleavage of the target RNA takes place in the middle of the region complementary to the guide sequence of the siRNA duplex (Elbashir et al., 2001, genes Dev., 15, 188). In addition, RNA interference can also involve small RNA (e.g., micro-RNA or miRNA) mediated gene silencing, presumably though cellular mechanisms that regulate chromatin structure and thereby prevent transcription of target gene sequences (see for example Allshire, 2002, Science, 297, 1818-1819; Volpe et al., 2002, Science, 297, 1833-1837; Jenuwein, 2002, Science, 297, 2215-2218; and Hall et al., 2002, Science, 297, 2232-2237). As such, siNA molecules of the invention can be used to mediate gene silencing via interaction with RNA transcripts or alternately by interaction with particular gene sequences, wherein such interaction results in gene silencing either at the transcriptional level or post-transcriptional level.

[0500] RNAi has been studied in a variety of systems. Fire et al., 1998, Nature, 391, 806, were the first to observe RNAI in C. elegans. Wianny and Goetz, 1999, Nature Cell Biol., 2, 70, describe RNAi mediated by dsRNA in mouse embryos. Hammond et al., 2000, Nature, 404, 293, describe RNAi in Drosophila cells transfected with dsRNA. Elbashir et al., 2001, Nature, 411, 494, describe RNAi induced by introduction of duplexes of synthetic 21-nucleotide RNAs in cultured mammalian cells including human embryonic kidney and HeLa cells. Recent work in Drosophila embryonic lysates has revealed certain requirements for siRNA length, structure, chemical composition, and sequence that are essential to mediate efficient RNAi activity. These studies have shown that 21 nucleotide siRNA duplexes are most active when containing two 2-nucleotide 3′-terminal nucleotide overhangs. Furthermore, substitution of one or both siRNA strands with 2′-deoxy or 2′-O-methyl nucleotides abolishes RNAi activity, whereas substitution of 3′-terminal siRNA nucleotides with deoxy nucleotides was shown to be tolerated. Mismatch sequences in the center of the siRNA duplex were also shown to abolish RNAi activity. In addition, these studies also indicate that the position of the cleavage site in the target RNA is defined by the 5′-end of the siRNA guide sequence rather than the 3′-end (Elbashir et al., 2001, EMBO J., 20, 6877). Other studies have indicated that a 5′-phosphate on the target-complementary strand of a siRNA duplex is required for siRNA activity and that ATP is utilized to maintain the 5′-phosphate moiety on the siRNA (Nykanen et al., 2001, Cell, 107, 309); however, siRNA molecules lacking a 5′-phosphate are active when introduced exogenously, suggesting that 5′-phosphorylation of siRNA constructs may occur in vivo.

### Duplex Forming Oligonucleotides (DFO) of the Invention

[0501] In one embodiment, the invention features siNA molecules comprising duplex forming oligonucleotides (DFO) that can self-assemble into double stranded oligonucleotides. The duplex forming oligonucleotides of the invention can be chemically synthesized or expressed from transcription units and/or vectors. The DFO molecules of the instant invention provide useful reagents and methods for a variety of therapeutic, diagnostic, agricultural, veterinary, target validation, genomic discovery, genetic engineering and pharmacogenomic applications.

[0502] Applicant demonstrates herein that certain oligonucleotides, referred to herein for convenience but not limitation as duplex forming oligonucleotides or DFO molecules, are potent mediators of sequence specific regulation of gene expression. The oligonucleotides of the invention are distinct from other nucleic acid sequences known in the art (e.g., siRNA, miRNA, stRNA, shRNA, antisense oligonucleotides etc.) in that they represent a class of linear polynucleotide sequences that are designed to self-assemble into double stranded oligonucleotides, where each strand in the double stranded oligonucleotides comprises a nucleotide sequence that is complementary to a target nucleic acid molecule. Nucleic acid molecules of the invention can thus self assemble into functional duplexes in which each strand of the duplex comprises the same polynucleotide sequence and each strand comprises a nucleotide sequence that is complementary to a target nucleic acid molecule.

[0503] Generally, double stranded oligonucleotides are formed by the assembly of two distinct oligonucleotide sequences where the oligonucleotide sequence of one strand is complementary to the oligonucleotide sequence of the second strand; such double stranded oligonucleotides are assembled from two separate oligonucleotides, or from a single molecule that folds on itself to form a double stranded structure, often referred to in the field as hairpin stem-loop structure (e.g., shRNA or short hairpin RNA). These double stranded oligonucleotides known in the art all have a common feature in that each strand of the duplex has a distinct nucleotide sequence.

[0504] Distinct from the double stranded nucleic acid molecules known in the art, the applicants have developed a novel, potentially cost effective and simplified method of forming a double stranded nucleic acid molecule starting from a single stranded or linear oligonucleotide. The two strands of the double stranded oligonucleotide formed according to the instant invention have the same nucleotide sequence and are not covalently linked to each other. Such double-stranded oligonucleotides molecules can be readily linked post-synthetically by methods and reagents known in the art and are within the scope of the invention. In one embodiment, the single stranded oligonucleotide of the invention (the duplex forming oligonucleotide) that forms a double stranded oligonucleotide comprises a first region and a second region, where the second region includes a nucleotide sequence that is an inverted repeat of the nucleotide sequence in the first region, or a portion thereof, such that the single stranded oligonucleotide self assembles to form a duplex oligonucleotide in which the nucleotide sequence of one strand of the duplex is the same as the nucleotide sequence of the second strand. Non-limiting examples of such duplex forming oligonucleotides are illustrated in FIGS. 14 and 15. These duplex forming oligonucleotides (DFOs) can optionally include certain palindrome or repeat sequences where such palindrome or repeat sequences are present in between the first region and the second region of the DFO.

[0505] In one embodiment, the invention features a duplex forming oligonucleotide (DFO) molecule, wherein the DFO comprises a duplex forming self complementary nucleic acid sequence that has nucleotide sequence complementary to a target nucleic acid sequence. The DFO molecule can comprise a single self complementary sequence or a duplex resulting from assembly of such self complementary sequences.

[0506] In one embodiment, a duplex forming oligonucleotide (DFO) of the invention comprises a first region and a second region, wherein the second region comprises a nucleotide sequence comprising an inverted repeat of nucleotide sequence of the first region such that the DFO molecule can assemble into a double stranded oligonucleotide. Such double stranded oligonucleotides can act as a short interfering nucleic acid (siNA) to modulate gene expression. Each strand of the double stranded oligonucleotide duplex formed by DFO molecules of the invention can comprise a nucleotide sequence region that is complementary to the same nucleotide sequence in a target nucleic acid molecule (e.g., target RNA).

[0507] In one embodiment, the invention features a single stranded DFO that can assemble into a double stranded oligonucleotide. The applicant has surprisingly found that a single stranded oligonucleotide with nucleotide regions of self complementarity can readily assemble into duplex oligonucleotide constructs. Such DFOs can assemble into duplexes that can inhibit gene expression in a sequence specific manner. The DFO molecules of the invention comprise a first region with nucleotide sequence that is complementary to the nucleotide sequence of a second region and where the sequence of the first region is complementary to a target nucleic acid (e.g., RNA). The DFO can form a double stranded oligonucleotide wherein a portion of each strand of the double stranded oligonucleotide comprises a sequence complementary to a target nucleic acid sequence.

[0508] In one embodiment, the invention features a double stranded oligonucleotide, wherein the two strands of the double stranded oligonucleotide are not covalently linked to each other, and wherein each strand of the double stranded oligonucleotide comprises a nucleotide sequence that is complementary to the same nucleotide sequence in a target nucleic acid molecule or a portion thereof (e.g., target RNA target). In another embodiment, the two strands of the double stranded oligonucleotide share an identical nucleotide sequence of at least about 15, preferably at least about 16, 17, 18, 19, 20, or 21 nucleotides.

[0509] In one embodiment, a DFO molecule of the invention comprises a structure having Formula DFO-I:

5′-p-XZX′-3′

wherein Z comprises a palindromic or repeat nucleic acid sequence optionally with one or more modified nucleotides (e.g., nucleotide with a modified base, such as 2-amino purine, 2-amino-1,6-dihydro purine or a universal base), for example of length about 2 to about 24 nucleotides in even numbers (e.g., about 2, 4, 6, 8, 10, 12, 14, 16, 18, 20, or 22 or 24 nucleotides), X represents a nucleic acid sequence, for example of length of about 1 to about 21 nucleotides (e.g., about 1, 2, 3, 4, 5, 6, 7, 8, 9, 10, 11, 12, 13, 14, 15, 16, 17, 18, 19, 20, or 21 nucleotides), X′ comprises a nucleic acid sequence, for example of length about 1 and about 21 nucleotides (e.g., about 1, 2, 3, 4, 5, 6, 7, 8, 9, 10, 11, 12, 13, 14, 15, 16, 17, 18, 19, 20 or 21 nucleotides) having nucleotide sequence complementarity to sequence X or a portion thereof, p comprises a terminal phosphate group that can be present or absent, and wherein sequence X and Z, either independently or together, comprise nucleotide sequence that is complementary to a target nucleic acid sequence or a portion thereof and is of length sufficient to interact (e.g., base pair) with the target nucleic acid sequence or a portion thereof (e.g., target RNA target). For example, X independently can comprise a sequence from about 12 to about 21 or more (e.g., about 12, 13, 14, 15, 16, 17, 18, 19, 20, 21, or more) nucleotides in length that is complementary to nucleotide sequence in a target RNA or a portion thereof. In another non-limiting example, the length of the nucleotide sequence of X and Z together, when X is present, that is complementary to the target or a portion thereof (e.g., target RNA target) is from about 12 to about 21 or more nucleotides (e.g., about 12, 13, 14, 15, 16, 17, 18, 19, 20, 21, or more). In yet another non-limiting example, when X is absent, the length of the nucleotide sequence of Z that is complementary to the target or a portion thereof is from about 12 to about 24 or more nucleotides (e.g., about 12, 14, 16, 18, 20, 22, 24, or more). In one embodiment X, Z and X′ are independently oligonucleotides, where X and/or Z comprises a nucleotide sequence of length sufficient to interact (e.g., base pair) with a nucleotide sequence in the target or a portion thereof (e.g., target RNA target). In one embodiment, the lengths of oligonucleotides X and X′ are identical. In another embodiment, the lengths of oligonucleotides X and X′ are not identical. In another embodiment, the lengths of oligonucleotides X and Z, or Z and X′, or X, Z and X′ are either identical or different.

[0510] When a sequence is described in this specification as being of “sufficient” length to interact (i.e., base pair) with another sequence, it is meant that the length is such that the number of bonds (e.g., hydrogen bonds) formed between the two sequences is enough to enable the two sequence to form a duplex under the conditions of interest. Such conditions can be in vitro (e.g., for diagnostic or assay purposes) or in vivo (e.g., for therapeutic purposes). It is a simple and routine matter to determine such lengths.

[0511] In one embodiment, the invention features a double stranded oligonucleotide construct having Formula DFO-I(a):

5′-p-XZX′-3′

3′-X′ZX-p-5′

wherein Z comprises a palindromic or repeat nucleic acid sequence or palindromic or repeat-like nucleic acid sequence with one or more modified nucleotides (e.g., nucleotides with a modified base, such as 2-amino purine, 2-amino-1,6-dihydro purine or a universal base), for example of length about 2 to about 24 nucleotides in even numbers (e.g., about 2, 4, 6, 8, 10, 12, 14, 16, 18, 20, 22 or 24 nucleotides), X represents a nucleic acid sequence, for example of length about 1 to about 21 nucleotides (e.g., about 1, 2, 3, 4, 5, 6, 7, 8, 9, 10, 11, 12, 13, 14, 15, 16, 17, 18, 19, 20, or 21 nucleotides), X′ comprises a nucleic acid sequence, for example of length about 1 to about 21 nucleotides (e.g., about 1, 2, 3, 4, 5, 6, 7, 8, 9, 10, 11, 12, 13, 14, 15, 16, 17, 18, 19, 20 or 21 nucleotides) having nucleotide sequence complementarity to sequence X or a portion thereof, p comprises a terminal phosphate group that can be present or absent, and wherein each X and Z independently comprises a nucleotide sequence that is complementary to a target nucleic acid sequence or a portion thereof (e.g., target RNA target) and is of length sufficient to interact with the target nucleic acid sequence of a portion thereof (e.g., target RNA target). For example, sequence X independently can comprise a sequence from about 12 to about 21 or more nucleotides (e.g., about 12, 13, 14, 15, 16, 17, 18, 19, 20, 21, or more) in length that is complementary to a nucleotide sequence in a target or a portion thereof (e.g., target RNA target). In another non-limiting example, the length of the nucleotide sequence of X and Z together (when X is present) that is complementary to the target or a portion thereof is from about 12 to about 21 or more nucleotides (e.g., about 12, 13, 14, 15, 16, 17, 18, 19, 20, 21, or more). In yet another non-limiting example, when X is absent, the length of the nucleotide sequence of Z that is complementary to the target or a portion thereof is from about 12 to about 24 or more nucleotides (e.g., about 12, 14, 16, 18, 20, 22, 24 or more). In one embodiment X, Z and X′ are independently oligonucleotides, where X and/or Z comprises a nucleotide sequence of length sufficient to interact (e.g., base pair) with nucleotide sequence in the target or a portion thereof (e.g., target RNA target). In one embodiment, the lengths of oligonucleotides X and X′ are identical. In another embodiment, the lengths of oligonucleotides X and X′ are not identical. In another embodiment, the lengths of oligonucleotides X and Z or Z and X′ or X, Z and X′ are either identical or different. In one embodiment, the double stranded oligonucleotide construct of Formula I(a) includes one or more, specifically 1, 2, 3 or 4, mismatches, to the extent such mismatches do not significantly diminish the ability of the double stranded oligonucleotide to inhibit target gene expression.

[0512] In one embodiment, a DFO molecule of the invention comprises structure having Formula DFO-II:

5′-p-XX′-3′

wherein each X and X′ are independently oligonucleotides of length about 12 nucleotides to about 21 nucleotides, wherein X comprises, for example, a nucleic acid sequence of length about 12 to about 21 nucleotides (e.g., about 12, 13, 14, 15, 16, 17, 18, 19, 20 or 21 nucleotides), X′ comprises a nucleic acid sequence, for example of length about 12 to about 21 nucleotides (e.g., about 12, 13, 14, 15, 16, 17, 18, 19, 20, or 21 nucleotides) having nucleotide sequence complementarity to sequence X or a portion thereof, p comprises a terminal phosphate group that can be present or absent, and wherein X comprises a nucleotide sequence that is complementary to a target nucleic acid sequence (e.g., target RNA) or a portion thereof and is of length sufficient to interact (e.g., base pair) with the target nucleic acid sequence of a portion thereof. In one embodiment, the length of oligonucleotides X and X′ are identical. In another embodiment the length of oligonucleotides X and X′ are not identical. In one embodiment, length of the oligonucleotides X and X′ are sufficient to form a relatively stable double stranded oligonucleotide.

[0513] In one embodiment, the invention features a double stranded oligonucleotide construct having Formula DFO-II(a):

5′-p-XX′-3′

3′-X′X-p-5′

wherein each X and X′ are independently oligonucleotides of length about 12 nucleotides to about 21 nucleotides, wherein X comprises a nucleic acid sequence, for example of length about 12 to about 21 nucleotides (e.g., about 12, 13, 14, 15, 16, 17, 18, 19, 20 or 21 nucleotides), X′ comprises a nucleic acid sequence, for example of length about 12 to about 21 nucleotides (e.g., about 12, 13, 14, 15, 16, 17, 18, 19, 20 or 21 nucleotides) having nucleotide sequence complementarity to sequence X or a portion thereof, p comprises a terminal phosphate group that can be present or absent, and wherein X comprises nucleotide sequence that is complementary to a target nucleic acid sequence or a portion thereof (e.g., target RNA target) and is of length sufficient to interact (e.g., base pair) with the target nucleic acid sequence (e.g., target RNA) or a portion thereof. In one embodiment, the lengths of oligonucleotides X and X′ are identical. In another embodiment, the lengths of oligonucleotides X and X′ are not identical. In one embodiment, the lengths of the oligonucleotides X and X′ are sufficient to form a relatively stable double stranded oligonucleotide. In one embodiment, the double stranded oligonucleotide construct of Formula II(a) includes one or more, specifically 1, 2, 3 or 4, mismatches, to the extent such mismatches do not significantly diminish the ability of the double stranded oligonucleotide to inhibit target gene expression.

[0514] In one embodiment, the invention features a DFO molecule having Formula DFO-I(b):

5′-p-Z-3′

where Z comprises a palindromic or repeat nucleic acid sequence optionally including one or more non-standard or modified nucleotides (e.g., nucleotide with a modified base, such as 2-amino purine or a universal base) that can facilitate base-pairing with other nucleotides. Z can be, for example, of length sufficient to interact (e.g., base pair) with nucleotide sequence of a target nucleic acid (e.g., target RNA) molecule, preferably of length of at least 12 nucleotides, specifically about 12 to about 24 nucleotides (e.g., about 12, 14, 16, 18, 20, 22 or 24 nucleotides). p represents a terminal phosphate group that can be present or absent.

[0515] In one embodiment, a DFO molecule having any of Formula DFO-I, DFO-I(a), DFO-I(b), DFO-II(a) or DFO-II can comprise chemical modifications as described herein without limitation, such as, for example, nucleotides having any of Formulae I-VII, stabilization chemistries as described in Table IV, or any other combination of modified nucleotides and non-nucleotides as described in the various embodiments herein.

[0516] In one embodiment, the palidrome or repeat sequence or modified nucleotide (e.g., nucleotide with a modified base, such as 2-amino purine or a universal base) in Z of DFO constructs having Formula DFO-I, DFO-I(a) and DFO-I(b), comprises chemically modified nucleotides that are able to interact with a portion of the target nucleic acid sequence (e.g., modified base analogs that can form Watson Crick base pairs or non-Watson Crick base pairs).

[0517] In one embodiment, a DFO molecule of the invention, for example a DFO having Formula DFO-I or DFO-II, comprises about 15 to about 40 nucleotides (e.g., about 15, 16, 17, 18, 19, 20, 21, 22, 23, 24, 25, 26, 27, 28, 29, 30, 31, 32, 33, 34, 35, 36, 37, 38, 39, or 40 nucleotides). In one embodiment, a DFO molecule of the invention comprises one or more chemical modifications. In a non-limiting example, the introduction of chemically modified nucleotides and/or non-nucleotides into nucleic acid molecules of the invention provides a powerful tool in overcoming potential limitations of in vivo stability and bioavailability inherent to unmodified RNA molecules that are delivered exogenously. For example, the use of chemically modified nucleic acid molecules can enable a lower dose of a particular nucleic acid molecule for a given therapeutic effect since chemically modified nucleic acid molecules tend to have a longer half-life in serum or in cells or tissues. Furthermore, certain chemical modifications can improve the bioavailability and/or potency of nucleic acid molecules by not only enhancing half-life but also facilitating the targeting of nucleic acid molecules to particular organs, cells or tissues and/or improving cellular uptake of the nucleic acid molecules. Therefore, even if the activity of a chemically modified nucleic acid molecule is reduced in vitro as compared to a native/unmodified nucleic acid molecule, for example when compared to an unmodified RNA molecule, the overall activity of the modified nucleic acid molecule can be greater than the native or unmodified nucleic acid molecule due to improved stability, potency, duration of effect, bioavailability and/or delivery of the molecule.

Multifunctional or Multi-Targeted siNA Molecules of the Invention

[0518] In one embodiment, the invention features siNA molecules comprising multifunctional short interfering nucleic acid (multifunctional siNA) molecules that modulate the expression of one or more target genes in a biologic system, such as a cell, tissue, or organism. The multifunctional short interfering nucleic acid (multifunctional siNA) molecules of the invention can target more than one region of the target nucleic acid sequence or can target sequences of more than one distinct target nucleic acid molecules (e.g., target and/or pathway target RNA and/or DNA sequences). The multifunctional siNA molecules of the invention can be chemically synthesized or expressed from transcription units and/or vectors. The multifunctional siNA molecules of the instant invention provide useful reagents and methods for a variety of human applications, therapeutic, diagnostic, agricultural, veterinary, target validation, genomic discovery, genetic engineering and pharmacogenomic applications.

[0519] Applicant demonstrates herein that certain oligonucleotides, referred to herein for convenience but not limitation as multifunctional short interfering nucleic acid or multifunctional siNA molecules, are potent mediators of sequence specific regulation of gene expression. The multifunctional siNA molecules of the invention are distinct from other nucleic acid sequences known in the art (e.g., siRNA, miRNA, stRNA, shRNA, antisense oligonucleotides, etc.) in that they represent a class of polynucleotide molecules that are designed such that each strand in the multifunctional siNA construct comprises a nucleotide sequence that is complementary to a distinct nucleic acid sequence in one or more target nucleic acid molecules. A single multifunctional siNA molecule (generally a double-stranded molecule) of the invention can thus target more than one (e.g., 2, 3, 4, 5, or more) differing target nucleic acid target molecules. Nucleic acid molecules of the invention can also target more than one (e.g., 2, 3, 4, 5, or more) region of the same target nucleic acid sequence. As such multifunctional siNA molecules of the invention are useful in down regulating or inhibiting the expression of one or more target nucleic acid molecules. For example, a multifunctional siNA molecule of the invention can target nucleic acid molecules encoding a virus or viral proteins and corresponding cellular proteins required for viral infection and/or replication, or differing strains of a particular virus (e.g., HCV). By reducing or inhibiting expression of more than one target nucleic acid molecule with one multifunctional siNA construct, multifunctional siNA molecules of the invention represent a class of potent therapeutic agents that can provide simultaneous inhibition of multiple targets within a disease or pathogen related pathway. Such simultaneous inhibition can provide synergistic therapeutic treatment strategies without the need for separate preclinical and clinical development efforts or complex regulatory approval process.

[0520] Use of multifunctional siNA molecules that target more then one region of a target nucleic acid molecule (e.g., target RNA or DNA) is expected to provide potent inhibition of gene expression. For example, a single multifunctional siNA construct of the invention can target both conserved and variable regions of a target nucleic acid molecule (e.g., target RNA or DNA), thereby allowing down regulation or inhibition of, for example, different target isoforms or variants to optimize therapeutic efficacy and minimize toxicity, or allowing for targeting of both coding and non-coding regions of the target nucleic acid molecule.

[0521] Generally, double stranded oligonucleotides are formed by the assembly of two distinct oligonucleotides where the oligonucleotide sequence of one strand is complementary to the oligonucleotide sequence of the second strand; such double stranded oligonucleotides are generally assembled from two separate oligonucleotides (e.g., siRNA). Alternately, a duplex can be formed from a single molecule that folds on itself (e.g., shRNA or short hairpin RNA). These double stranded oligonucleotides are known in the art to mediate RNA interference and all have a common feature wherein only one nucleotide sequence region (guide sequence or the antisense sequence) has complementarity to a target nucleic acid sequence, and the other strand (sense sequence) comprises nucleotide sequence that is homologous to the target nucleic acid sequence. generally, the antisense sequence is retained in the active RISC complex and guides the RISC to the target nucleotide sequence by means of complementary base-pairing of the antisense sequence with the target sequence for mediating sequence-specific RNA interference. It is known in the art that in some cell culture systems, certain types of unmodified siRNAs can exhibit “off target” effects. It is hypothesized that this off-target effect involves the participation of the sense sequence instead of the antisense sequence of the siRNA in the RISC complex (see for example Schwarz et al., 2003, Cell, 115, 199-208). In this instance the sense sequence is believed to direct the RISC complex to a sequence (off-target sequence) that is distinct from the intended target sequence, resulting in the inhibition of the off-target sequence. In these double stranded nucleic acid molecules, each strand is complementary to a distinct target nucleic acid sequence. However, the off-targets that are affected by these dsRNAs are not entirely predictable and are non-specific.

[0522] Distinct from the double stranded nucleic acid molecules known in the art, the applicants have developed a novel, potentially cost effective and simplified method of down regulating or inhibiting the expression of more than one target nucleic acid sequence using a single multifunctional siNA construct. The multifunctional siNA molecules of the invention are designed to be double-stranded or partially double stranded, such that a portion of each strand or region of the multifunctional siNA is complementary to a target nucleic acid sequence of choice. As such, the multifunctional siNA molecules of the invention are not limited to targeting sequences that are complementary to each other, but rather to any two differing target nucleic acid sequences. Multifunctional siNA molecules of the invention are designed such that each strand or region of the multifunctional siNA molecule, that is complementary to a given target nucleic acid sequence, is of suitable length (e.g., from about 16 to about 28 nucleotides in length, preferably from about 18 to about 28 nucleotides in length) for mediating RNA interference against the target nucleic acid sequence. The complementarity between the target nucleic acid sequence and a strand or region of the multifunctional siNA must be sufficient (at least about 8 base pairs) for cleavage of the target nucleic acid sequence by RNA interference. Multifunctional siNA of the invention is expected to minimize off-target effects seen with certain siRNA sequences, such as those described in Schwarz et al., supra.

[0523] It has been reported that dsRNAs of length between 29 base pairs and 36 base pairs (Tuschl et al., International PCT Publication No. WO 02/44321) do not mediate RNAi. One reason these dsRNAs are inactive may be the lack of turnover or dissociation of the strand that interacts with the target RNA sequence, such that the RISC complex is not able to efficiently interact with multiple copies of the target RNA resulting in a significant decrease in the potency and efficiency of the RNAi process. Applicant has surprisingly found that the multifunctional siNAs of the invention can overcome this hurdle and are capable of enhancing the efficiency and potency of RNAi process. As such, in certain embodiments of the invention, multifunctional siNAs of length of about 29 to about 36 base pairs can be designed such that, a portion of each strand of the multifunctional siNA molecule comprises a nucleotide sequence region that is complementary to a target nucleic acid of length sufficient to mediate RNAi efficiently (e.g., about 15 to about 23 base pairs) and a nucleotide sequence region that is not complementary to the target nucleic acid. By having both complementary and non-complementary portions in each strand of the multifunctional siNA, the multifunctional siNA can mediate RNA interference against a target nucleic acid sequence without being prohibitive to turnover or dissociation (e.g., where the length of each strand is too long to mediate RNAi against the respective target nucleic acid sequence). Furthermore, design of multifunctional siNA molecules of the invention with internal overlapping regions allows the multifunctional siNA molecules to be of favorable (decreased) size for mediating RNA interference and of size that is well suited for use as a therapeutic agent (e.g., wherein each strand is independently from about 18 to about 28 nucleotides in length). Non-limiting examples are illustrated in FIGS. 16-28.

[0524] In one embodiment, a multifunctional siNA molecule of the invention comprises a first region and a second region, where the first region of the multifunctional siNA comprises a nucleotide sequence complementary to a nucleic acid sequence of a first target nucleic acid molecule, and the second region of the multifunctional siNA comprises nucleic acid sequence complementary to a nucleic acid sequence of a second target nucleic acid molecule. In one embodiment, a multifunctional siNA molecule of the invention comprises a first region and a second region, where the first region of the multifunctional siNA comprises nucleotide sequence complementary to a nucleic acid sequence of the first region of a target nucleic acid molecule, and the second region of the multifunctional siNA comprises nucleotide sequence complementary to a nucleic acid sequence of a second region of a the target nucleic acid molecule. In another embodiment, the first region and second region of the multifunctional siNA can comprise separate nucleic acid sequences that share some degree of complementarity (e.g., from about 1 to about 10 complementary nucleotides). In certain embodiments, multifunctional siNA constructs comprising separate nucleic acid sequences can be readily linked post-synthetically by methods and reagents known in the art and such linked constructs are within the scope of the invention. Alternately, the first region and second region of the multifunctional siNA can comprise a single nucleic acid sequence having some degree of self complementarity, such as in a hairpin or stem-loop structure. Non-limiting examples of such double stranded and hairpin multifunctional short interfering nucleic acids are illustrated in FIGS. 16 and 17 respectively. These multifunctional short interfering nucleic acids (multifunctional siNAs) can optionally include certain overlapping nucleotide sequence where such overlapping nucleotide sequence is present in between the first region and the second region of the multifunctional siNA (see for example FIGS. 18 and 19).

[0525] In one embodiment, the invention features a multifunctional short interfering nucleic acid (multifunctional siNA) molecule, wherein each strand of the multifunctional siNA independently comprises a first region of nucleic acid sequence that is complementary to a distinct target nucleic acid sequence and the second region of nucleotide sequence that is not complementary to the target sequence. The target nucleic acid sequence of each strand is in the same target nucleic acid molecule or different target nucleic acid molecules.

[0526] In another embodiment, the multifunctional siNA comprises two strands, where: (a) the first strand comprises a region having sequence complementarity to a target nucleic acid sequence (complementary region 1) and a region having no sequence complementarity to the target nucleotide sequence (non-complementary region 1); (b) the second strand of the multifunction siNA comprises a region having sequence complementarity to a target nucleic acid sequence that is distinct from the target nucleotide sequence complementary to the first strand nucleotide sequence (complementary region 2), and a region having no sequence complementarity to the target nucleotide sequence of complementary region 2 (non-complementary region 2); (c) the complementary region 1 of the first strand comprises a nucleotide sequence that is complementary to a nucleotide sequence in the non-complementary region 2 of the second strand and the complementary region 2 of the second strand comprises a nucleotide sequence that is complementary to a nucleotide sequence in the non-complementary region 1 of the first strand. The target nucleic acid sequence of complementary region 1 and complementary region 2 is in the same target nucleic acid molecule or different target nucleic acid molecules.

[0527] In another embodiment, the multifunctional siNA comprises two strands, where: (a) the first strand comprises a region having sequence complementarity to a target nucleic acid sequence derived from a gene (e.g., a first gene) (complementary region 1) and a region having no sequence complementarity to the target nucleotide sequence of complementary region 1 (non-complementary region 1); (b) the second strand of the multifunction siNA comprises a region having sequence complementarity to a target nucleic acid sequence derived from a gene (e.g., a second gene) that is distinct from the gene of complementary region 1 (complementary region 2), and a region having no sequence complementarity to the target nucleotide sequence of complementary region 2 (non-complementary region 2); (c) the complementary region 1 of the first strand comprises a nucleotide sequence that is complementary to a nucleotide sequence in the non-complementary region 2 of the second strand and the complementary region 2 of the second strand comprises a nucleotide sequence that is complementary to a nucleotide sequence in the non-complementary region 1 of the first strand.

[0528] In another embodiment, the multifunctional siNA comprises two strands, where: (a) the first strand comprises a region having sequence complementarity to a target nucleic acid sequence derived from a gene (e.g., gene) (complementary region 1) and a region having no sequence complementarity to the target nucleotide sequence of complementary region 1 (non-complementary region 1); (b) the second strand of the multifunction siNA comprises a region having sequence complementarity to a target nucleic acid sequence distinct from the target nucleic acid sequence of complementary region 1 (complementary region 2), provided, however, that the target nucleic acid sequence for complementary region 1 and target nucleic acid sequence for complementary region 2 are both derived from the same gene, and a region having no sequence complementarity to the target nucleotide sequence of complementary region 2 (non-complementary region 2); (c) the complementary region 1 of the first strand comprises a nucleotide sequence that is complementary to a nucleotide sequence in the non-complementary region 2 of the second strand and the complementary region 2 of the second strand comprises a nucleotide sequence that is complementary to nucleotide sequence in the non-complementary region 1 of the first strand.

[0529] In one embodiment, the invention features a multifunctional short interfering nucleic acid (multifunctional siNA) molecule, wherein the multifunctional siNA comprises two complementary nucleic acid sequences in which the first sequence comprises a first region having nucleotide sequence complementary to nucleotide sequence within a first target nucleic acid molecule, and in which the second sequence comprises a first region having nucleotide sequence complementary to a distinct nucleotide sequence within the same target nucleic acid molecule. Preferably, the first region of the first sequence is also complementary to the nucleotide sequence of the second region of the second sequence, and where the first region of the second sequence is complementary to the nucleotide sequence of the second region of the first sequence.

[0530] In one embodiment, the invention features a multifunctional short interfering nucleic acid (multifunctional siNA) molecule, wherein the multifunctional siNA comprises two complementary nucleic acid sequences in which the first sequence comprises a first region having a nucleotide sequence complementary to a nucleotide sequence within a first target nucleic acid molecule, and in which the second sequence comprises a first region having a nucleotide sequence complementary to a distinct nucleotide sequence within a second target nucleic acid molecule. Preferably, the first region of the first sequence is also complementary to the nucleotide sequence of the second region of the second sequence, and where the first region of the second sequence is complementary to the nucleotide sequence of the second region of the first sequence.

[0531] In one embodiment, the invention features a multifunctional siNA molecule comprising a first region and a second region, where the first region comprises a nucleic acid sequence having about 18 to about 28 nucleotides complementary to a nucleic acid sequence within a first target nucleic acid molecule, and the second region comprises nucleotide sequence having about 18 to about 28 nucleotides complementary to a distinct nucleic acid sequence within a second target nucleic acid molecule.

[0532] In one embodiment, the invention features a multifunctional siNA molecule comprising a first region and a second region, where the first region comprises nucleic acid sequence having about 18 to about 28 nucleotides complementary to a nucleic acid sequence within a target nucleic acid molecule, and the second region comprises nucleotide sequence having about 18 to about 28 nucleotides complementary to a distinct nucleic acid sequence within the same target nucleic acid molecule.

[0533] In one embodiment, the invention features a double stranded multifunctional short interfering nucleic acid (multifunctional siNA) molecule, wherein one strand of the multifunctional siNA comprises a first region having nucleotide sequence complementary to a first target nucleic acid sequence, and the second strand comprises a first region having a nucleotide sequence complementary to a second target nucleic acid sequence. The first and second target nucleic acid sequences can be present in separate target nucleic acid molecules or can be different regions within the same target nucleic acid molecule. As such, multifunctional siNA molecules of the invention can be used to target the expression of different genes, splice variants of the same gene, both mutant and conserved regions of one or more gene transcripts, or both coding and non-coding sequences of the same or differing genes or gene transcripts.

[0534] In one embodiment, a target nucleic acid molecule of the invention encodes a single protein. In another embodiment, a target nucleic acid molecule encodes more than one protein (e.g., 1, 2, 3, 4, 5 or more proteins). As such, a multifunctional siNA construct of the invention can be used to down regulate or inhibit the expression of several proteins. For example, a multifunctional siNA molecule comprising a region in one strand having nucleotide sequence complementarity to a first target nucleic acid sequence derived from a viral genome (e.g., HCV) and the second strand comprising a region with nucleotide sequence complementarity to a second target nucleic acid sequence present in target nucleic acid molecules derived from genes encoding two proteins (e.g., two differing host proteins involved in the HCV life-cycle) can be used to down regulate, inhibit, or shut down a particular biologic pathway by targeting, for example, a viral RNA (e.g., HCV RNA) and one or more host RNAs that are involved in viral infection or the viral life-cycle (e.g., La antigen or interferon regulatory factors).

[0535] In one embodiment the invention takes advantage of conserved nucleotide sequences present in different gene variants. By designing multifunctional siNAs in a manner where one strand includes a sequence that is complementary to one or more target nucleic acid sequences that are conserved among various target gene family members and the other strand optionally includes sequence that is complementary to pathway target nucleic acid sequence, it is possible to selectively and effectively inhibit a target gene disease related biological pathway using a single multifunctional siNA.

[0536] In one embodiment, a multifunctional short interfering nucleic acid (multifunctional siNA) of the invention comprises a first region and a second region, wherein the first region comprises nucleotide sequence complementary to a first target RNA of a first target and the second region comprises nucleotide sequence complementary to a second target RNA of a second target. In one embodiment, the first and second regions can comprise nucleotide sequence complementary to shared or conserved RNA sequences of differing target sites within the same target sequence or shared amongst different target sequences.

[0537] In another nonlimiting example, a multifunctional siNA molecule comprising a region in one strand having a nucleotide sequence complementarity to a first target nucleic acid sequence (e.g., conserved sequence) present in a target nucleic acid molecule such as a viral genome (e.g., HCV RNA) and the second strand comprising a region having a nucleotide sequence complementarity to a second target nucleic acid sequence (e.g., conserved sequence) present in target nucleic acid molecule derived from a gene encoding a viral protein (e.g., HCV proteins) to down regulate, inhibit, or shut down the viral replication and infection by targeting the viral genome and viral encoded proteins necessary for viral infection or replication.

[0538] In one embodiment the invention takes advantage of conserved nucleotide sequences present in different strains, isotypes or forms of a virus and genes encoded by these different strains, isotypes and forms of the virus (e.g., HCV). By designing multifunctional siNAs in a manner where one strand includes a sequence that is complementary to target nucleic acid sequence conserved among various strains, isotypes or forms of a virus and the other strand includes sequence that is complementary to target nucleic acid sequence conserved in a protein encoded by the virus, it is possible to selectively and effectively inhibit viral replication or infection using a single multifunctional siNA.

[0539] In one embodiment, a multifunctional short interfering nucleic acid (multifunctional siNA) of the invention comprises a first region and a second region, wherein the first region comprises nucleotide sequence complementary to a HCV viral RNA of a first viral strain and the second region comprises nucleotide sequence complementary to a HCV viral RNA of a second viral strain. In one embodiment, the first and second regions can comprise nucleotide sequence complementary to shared or conserved RNA sequences of differing viral strains or classes or viral strains.

[0540] In one embodiment, a multifunctional short interfering nucleic acid (multifunctional siNA) of the invention comprises a first region and a second region, wherein the first region comprises a nucleotide sequence complementary to a HCV viral RNA encoding one or more HCV viruses (e.g., one or more strains of HCV) and the second region comprises a nucleotide sequence complementary to a viral RNA encoding one or more interferon agonist proteins. In one embodiment, the first region can comprise a nucleotide sequence complementary to shared or conserved RNA sequences of differing HCV viral strains or classes of HCV viral strains. Non-limiting example of interferon agonist proteins include any protein that is capable of inhibition or suppressing RNA silencing (e.g., RNA binding proteins such as E3L or NS1 or equivalents thereof, see for example Li et al., 2004, PNAS, 101, 1350-1355).

[0541] In one embodiment, a multifunctional short interfering nucleic acid (multifunctional siNA) of the invention comprises a first region and a second region, wherein the first region comprises nucleotide sequence complementary to a HCV viral RNA and the second region comprises nucleotide sequence complementary to a cellular RNA that is involved in HCV viral infection and/or replication. Non-limiting examples of cellular RNAs involved in viral infection and/or replication include cellular receptors, cell surface molecules, cellular enzymes, cellular transcription factors, and/or cytokines, second messengers, and cellular accessory molecules including, but not limited to, La antigen, FAS, interferon agonist proteins (e.g., E3L or NS1 or equivalents thereof, see for example Li et al., 2004, PNAS, 101, 1350-1355), interferon regulatory factors (IRFs); cellular PKR protein kinase (PKR); human eukaryotic initiation factors 2B (elF2B gamma and/or elF2gamma); human DEAD Box protein (DDX3); and cellular proteins that bind to the poly(U) tract of the HCV 3′-UTR, such as polypyrimidine tract-binding protein.

[0542] In one embodiment, a double stranded multifunctional siNA molecule of the invention comprises a structure having Formula MF-I:

5′-p-XZX′-3′

3′-Y′ZY-p-5′

wherein each 5′-p-XZX′-3′ and 5′-p-YZY′-3′ are independently an oligonucleotide of length about 20 nucleotides to about 300 nucleotides, preferably about 20 to about 200 nucleotides, about 20 to about 100 nucleotides, about 20 to about 40 nucleotides, about 20 to about 40 nucleotides, about 24 to about 38 nucleotides, or about 26 to about 38 nucleotides; XZ comprises a nucleic acid sequence that is complementary to a first HCV target nucleic acid sequence; YZ is an oligonucleotide comprising nucleic acid sequence that is complementary to a second HCV target nucleic acid sequence; Z comprises nucleotide sequence of length about 1 to about 24 nucleotides (e.g., about 1, 2, 3, 4, 5, 6, 7, 8, 9, 10, 11, 12, 13, 14, 15, 16, 17, 18, 19, 20, 21, 22, 23, or 24 nucleotides) that is self complementary; X comprises nucleotide sequence of length about 1 to about 100 nucleotides, preferably about 1 to about 21 nucleotides (e.g., about 1, 2, 3, 4, 5, 6, 7, 8, 9, 10, 11, 12, 13, 14, 15, 16, 17, 18, 19, 20, or 21 nucleotides) that is complementary to nucleotide sequence present in region Y′; Y comprises nucleotide sequence of length about 1 to about 100 nucleotides, preferably about 1 to about 21 nucleotides (e.g., about 1, 2, 3, 4, 5, 6, 7, 8, 9, 10, 11, 12, 13, 14, 15, 16, 17, 18, 19, 20 or 21 nucleotides) that is complementary to nucleotide sequence present in region X′; each p comprises a terminal phosphate group that is independently present or absent; each XZ and YZ is independently of length sufficient to stably interact (i.e., base pair) with the first and second target nucleic acid sequence, respectively, or a portion thereof. For example, each sequence X and Y can independently comprise sequence from about 12 to about 21 or more nucleotides in length (e.g., about 12, 13, 14, 15, 16, 17, 18, 19, 20, 21, or more) that is complementary to a target nucleotide sequence in different target nucleic acid molecules, such as target RNAs or a portion thereof. In another non-limiting example, the length of the nucleotide sequence of X and Z together that is complementary to the first HCV target nucleic acid sequence or a portion thereof is from about 12 to about 21 or more nucleotides (e.g., about 12, 13, 14, 15, 16, 17, 18, 19, 20, 21, or more). In another non-limiting example, the length of the nucleotide sequence of Y and Z together, that is complementary to the second HCV target nucleic acid sequence or a portion thereof is from about 12 to about 21 or more nucleotides (e.g., about 12, 13, 14, 15, 16, 17, 18, 19, 20, 21, or more). In one embodiment, the first HCV target nucleic acid sequence and the second HCV target nucleic acid sequence are present in the same target nucleic acid molecule (e.g., HCV RNA or host RNA). In another embodiment, the first HCV target nucleic acid sequence and the second HCV target nucleic acid sequence are present in different target nucleic acid molecules (e.g., HCV RNA and host RNA). In one embodiment, Z comprises a palindrome or a repeat sequence. In one embodiment, the lengths of oligonucleotides X and X′ are identical. In another embodiment, the lengths of oligonucleotides X and X′ are not identical. In one embodiment, the lengths of oligonucleotides Y and Y′ are identical. In another embodiment, the lengths of oligonucleotides Y and Y′ are not identical. In one embodiment, the double stranded oligonucleotide construct of Formula I(a) includes one or more, specifically 1, 2, 3 or 4, mismatches, to the extent such mismatches do not significantly diminish the ability of the double stranded oligonucleotide to inhibit target gene expression.

[0543] In one embodiment, a multifunctional siNA molecule of the invention comprises a structure having Formula MF-II:

5′-p-XX′-3′

3′-Y′Y-p-5′

wherein each 5′-p-XX′-3′ and 5′-p-YY′-3′ are independently an oligonucleotide of length about 20 nucleotides to about 300 nucleotides, preferably about 20 to about 200 nucleotides, about 20 to about 100 nucleotides, about 20 to about 40 nucleotides, about 20 to about 40 nucleotides, about 24 to about 38 nucleotides, or about 26 to about 38 nucleotides; X comprises a nucleic acid sequence that is complementary to a first target nucleic acid sequence; Y is an oligonucleotide comprising nucleic acid sequence that is complementary to a second target nucleic acid sequence; X comprises a nucleotide sequence of length about 1 to about 100 nucleotides, preferably about 1 to about 21 nucleotides (e.g., about 1, 2, 3, 4, 5, 6, 7, 8, 9, 10, 11, 12, 13, 14, 15, 16, 17, 18, 19, 20, or 21 nucleotides) that is complementary to nucleotide sequence present in region Y′; Y comprises nucleotide sequence of length about 1 to about 100 nucleotides, preferably about 1 to about 21 nucleotides (e.g., about 1, 2, 3, 4, 5, 6, 7, 8, 9, 10, 11, 12, 13, 14, 15, 16, 17, 18, 19, 20 or 21 nucleotides) that is complementary to nucleotide sequence present in region X′; each p comprises a terminal phosphate group that is independently present or absent; each X and Y independently is of length sufficient to stably interact (i.e., base pair) with the first and second target nucleic acid sequence, respectively, or a portion thereof. For example, each sequence X and Y can independently comprise sequence from about 12 to about 21 or more nucleotides in length (e.g., about 12, 13, 14, 15, 16, 17, 18, 19, 20, 21, or more) that is complementary to a target nucleotide sequence in different target nucleic acid molecules, such as HCV target RNAs or a portion thereof. In one embodiment, the first HCV target nucleic acid sequence and the second HCV target nucleic acid sequence are present in the same target nucleic acid molecule (e.g., HCV RNA or host RNA). In another embodiment, the first HCV target nucleic acid sequence and the second HCV target nucleic acid sequence are present in different target nucleic acid molecules (e.g., HCV RNA and host RNA). In one embodiment, Z comprises a palindrome or a repeat sequence. In one embodiment, the lengths of oligonucleotides X and X′ are identical. In another embodiment, the lengths of oligonucleotides X and X′ are not identical.

[0544] In one embodiment, the lengths of oligonucleotides Y and Y′ are identical. In another embodiment, the lengths of oligonucleotides Y and Y′ are not identical. In one embodiment, the double stranded oligonucleotide construct of Formula I(a) includes one or more, specifically 1, 2, 3 or 4, mismatches, to the extent such mismatches do not significantly diminish the ability of the double stranded oligonucleotide to inhibit target gene expression.

[0545] In one embodiment, a multifunctional siNA molecule of the invention comprises a structure having Formula MF-III:

XX′

Y′—W—Y

wherein each X, X′, Y, and Y′ is independently an oligonucleotide of length about 15 nucleotides to about 50 nucleotides, preferably about 18 to about 40 nucleotides, or about 19 to about 23 nucleotides; X comprises nucleotide sequence that is complementary to nucleotide sequence present in region Y′; X′ comprises nucleotide sequence that is complementary to nucleotide sequence present in region Y; each X and X′ is independently of length sufficient to stably interact (i.e., base pair) with a first and a second HCV target nucleic acid sequence, respectively, or a portion thereof; W represents a nucleotide or non-nucleotide linker that connects sequences Y′ and Y; and the multifunctional siNA directs cleavage of the first and second HCV target sequence via RNA interference. In one embodiment, the first HCV target nucleic acid sequence and the second HCV target nucleic acid sequence are present in the same target nucleic acid molecule (e.g., HCV RNA or host RNA). In another embodiment, the first HCV target nucleic acid sequence and the second HCV target nucleic acid sequence are present in different target nucleic acid molecules (e.g., HCV RNA and host RNA). In one embodiment, region W connects the 3′-end of sequence Y′ with the 3′-end of sequence Y. In one embodiment, region W connects the 3′-end of sequence Y′ with the 5′-end of sequence Y. In one embodiment, region W connects the 5′-end of sequence Y′ with the 5′-end of sequence Y. In one embodiment, region W connects the 5′-end of sequence Y′ with the 3′-end of sequence Y. In one embodiment, a terminal phosphate group is present at the 5′-end of sequence X. In one embodiment, a terminal phosphate group is present at the 5′-end of sequence X′. In one embodiment, a terminal phosphate group is present at the 5′-end of sequence Y. In one embodiment, a terminal phosphate group is present at the 5′-end of sequence Y′. In one embodiment, W connects sequences Y and Y′ via a biodegradable linker. In one embodiment, W further comprises a conjugate, lable, aptamer, ligand, lipid, or polymer.

[0546] In one embodiment, a multifunctional siNA molecule of the invention comprises a structure having Formula MF-IV:

XX′

Y′—W—Y

wherein each X, X′, Y, and Y′ is independently an oligonucleotide of length about 15 nucleotides to about 50 nucleotides, preferably about 18 to about 40 nucleotides, or about 19 to about 23 nucleotides; X comprises nucleotide sequence that is complementary to nucleotide sequence present in region Y′; X′ comprises nucleotide sequence that is complementary to nucleotide sequence present in region Y; each Y and Y′ is independently of length sufficient to stably interact (i.e., base pair) with a first and a second HCV target nucleic acid sequence, respectively, or a portion thereof; W represents a nucleotide or non-nucleotide linker that connects sequences Y′ and Y; and the multifunctional siNA directs cleavage of the first and second HCV target sequence via RNA interference. In one embodiment, the first HCV target nucleic acid sequence and the second HCV target nucleic acid sequence are present in the same target nucleic acid molecule (e.g., HCV RNA or host RNA). In another embodiment, the first HCV target nucleic acid sequence and the second HCV target nucleic acid sequence are present in different target nucleic acid molecules (e.g., HCV RNA and host RNA). In one embodiment, region W connects the 3′-end of sequence Y′ with the 3′-end of sequence Y. In one embodiment, region W connects the 3′-end of sequence Y′ with the 5′-end of sequence Y. In one embodiment, region W connects the 5′-end of sequence Y′ with the 5′-end of sequence Y. In one embodiment, region W connects the 5′-end of sequence Y′ with the 3′-end of sequence Y. In one embodiment, a terminal phosphate group is present at the 5′-end of sequence X. In one embodiment, a terminal phosphate group is present at the 5′-end of sequence X′. In one embodiment, a terminal phosphate group is present at the 5′-end of sequence Y. In one embodiment, a terminal phosphate group is present at the 5′-end of sequence Y′. In one embodiment, W connects sequences Y and Y′ via a biodegradable linker. In one embodiment, W further comprises a conjugate, lable, aptamer, ligand, lipid, or polymer.

[0547] In one embodiment, a multifunctional siNA molecule of the invention comprises a structure having Formula MF-V:

XX′

Y′—W—Y

wherein each X, X′, Y, and Y′ is independently an oligonucleotide of length about 15 nucleotides to about 50 nucleotides, preferably about 18 to about 40 nucleotides, or about 19 to about 23 nucleotides; X comprises nucleotide sequence that is complementary to nucleotide sequence present in region Y′; X′ comprises nucleotide sequence that is complementary to nucleotide sequence present in region Y; each X, X′, Y, or Y′ is independently of length sufficient to stably interact (i.e., base pair) with a first, second, third, or fourth HCV target nucleic acid sequence, respectively, or a portion thereof; W represents a nucleotide or non-nucleotide linker that connects sequences Y′ and Y; and the multifunctional siNA directs cleavage of the first, second, third, and/or fourth target sequence via RNA interference. In one embodiment, the first, second, third and fourth HCV target nucleic acid sequence are all present in the same target nucleic acid molecule (e.g., HCV RNA or host RNA). In another embodiment, the first, second, third and fourth HCV target nucleic acid sequence are independently present in different target nucleic acid molecules (e.g., HCV RNA and host RNA). In one embodiment, region W connects the 3′-end of sequence Y′ with the 3′-end of sequence Y. In one embodiment, region W connects the 3′-end of sequence Y′ with the 5′-end of sequence Y. In one embodiment, region W connects the 5′-end of sequence Y′ with the 5′-end of sequence Y. In one embodiment, region W connects the 5′-end of sequence Y′ with the 3′-end of sequence Y. In one embodiment, a terminal phosphate group is present at the 5′-end of sequence X. In one embodiment, a terminal phosphate group is present at the 5′-end of sequence X′. In one embodiment, a terminal phosphate group is present at the 5′-end of sequence Y. In one embodiment, a terminal phosphate group is present at the 5′-end of sequence Y′. In one embodiment, W connects sequences Y and Y′ via a biodegradable linker. In one embodiment, W further comprises a conjugate, lable, aptamer, ligand, lipid, or polymer.

[0548] In one embodiment, regions X and Y of multifunctional siNA molecule of the invention (e.g., having any of Formula MF-I-MF-V), are complementary to different target nucleic acid sequences that are portions of the same target nucleic acid molecule. In one embodiment, such target nucleic acid sequences are at different locations within the coding region of a RNA transcript. In one embodiment, such target nucleic acid sequences comprise coding and non-coding regions of the same RNA transcript. In one embodiment, such target nucleic acid sequences comprise regions of alternately spliced transcripts or precursors of such alternately spliced transcripts.

[0549] In one embodiment, a multifunctional siNA molecule having any of Formula MF-I-MF-V can comprise chemical modifications as described herein without limitation, such as, for example, nucleotides having any of Formulae I-VII described herein, stabilization chemistries as described in Table IV, or any other combination of modified nucleotides and non-nucleotides as described in the various embodiments herein.

[0550] In one embodiment, the palidrome or repeat sequence or modified nucleotide (e.g., nucleotide with a modified base, such as 2-amino purine or a universal base) in Z of multifunctional siNA constructs having Formula MF-I or MF-II comprises chemically modified nucleotides that are able to interact with a portion of the target nucleic acid sequence (e.g., modified base analogs that can form Watson Crick base pairs or non-Watson Crick base pairs).

[0551] In one embodiment, a multifunctional siNA molecule of the invention, for example each strand of a multifunctional siNA having MF-I-MF-V, independently comprises about 15 to about 40 nucleotides (e.g., about 15, 16, 17, 18, 19, 20, 21, 22, 23, 24, 25, 26, 27, 28, 29, 30, 31, 32, 33, 34, 35, 36, 37, 38, 39, or 40 nucleotides). In one embodiment, a multifunctional siNA molecule of the invention comprises one or more chemical modifications. In a non-limiting example, the introduction of chemically modified nucleotides and/or non-nucleotides into nucleic acid molecules of the invention provides a powerful tool in overcoming potential limitations of in vivo stability and bioavailability inherent to unmodified RNA molecules that are delivered exogenously. For example, the use of chemically modified nucleic acid molecules can enable a lower dose of a particular nucleic acid molecule for a given therapeutic effect since chemically modified nucleic acid molecules tend to have a longer half-life in serum or in cells or tissues. Furthermore, certain chemical modifications can improve the bioavailability and/or potency of nucleic acid molecules by not only enhancing half-life but also facilitating the targeting of nucleic acid molecules to particular organs, cells or tissues and/or improving cellular uptake of the nucleic acid molecules. Therefore, even if the activity of a chemically modified nucleic acid molecule is reduced in vitro as compared to a native/unmodified nucleic acid molecule, for example when compared to an unmodified RNA molecule, the overall activity of the modified nucleic acid molecule can be greater than the native or unmodified nucleic acid molecule due to improved stability, potency, duration of effect, bioavailability and/or delivery of the molecule.

[0552] In another embodiment, the invention features multifunctional siNAs, wherein the multifunctional siNAs are assembled from two separate double-stranded siNAs, with one of the ends of each sense strand is tethered to the end of the sense strand of the other siNA molecule, such that the two antisense siNA strands are annealed to their corresponding sense strand that are tethered to each other at one end (see FIG. 22). The tethers or linkers can be nucleotide-based linkers or non-nucleotide based linkers as generally known in the art and as described herein.

[0553] In one embodiment, the invention features a multifunctional siNA, wherein the multifunctional siNA is assembled from two separate double-stranded siNAs, with the 5′-end of one sense strand of the siNA is tethered to the 5′-end of the sense strand of the other siNA molecule, such that the 5′-ends of the two antisense siNA strands, annealed to their corresponding sense strand that are tethered to each other at one end, point away (in the opposite direction) from each other (see FIG. 22 (A)). The tethers or linkers can be nucleotide-based linkers or non-nucleotide based linkers as generally known in the art and as described herein.

[0554] In one embodiment, the invention features a multifunctional siNA, wherein the multifunctional siNA is assembled from two separate double-stranded siNAs, with the 3′-end of one sense strand of the siNA is tethered to the 3′-end of the sense strand of the other siNA molecule, such that the 5′-ends of the two antisense siNA strands, annealed to their corresponding sense strand that are tethered to each other at one end, face each other (see FIG. 22 (B)). The tethers or linkers can be nucleotide-based linkers or non-nucleotide based linkers as generally known in the art and as described herein.

[0555] In one embodiment, the invention features a multifunctional siNA, wherein the multifunctional siNA is assembled from two separate double-stranded siNAs, with the 5′-end of one sense strand of the siNA is tethered to the 3′-end of the sense strand of the other siNA molecule, such that the 5′-end of the one of the antisense siNA strands annealed to their corresponding sense strand that are tethered to each other at one end, faces the 3′-end of the other antisense strand (see FIG. 22 (C-D)). The tethers or linkers can be nucleotide-based linkers or non-nucleotide based linkers as generally known in the art and as described herein.

[0556] In one embodiment, the invention features a multifunctional siNA, wherein the multifunctional siNA is assembled from two separate double-stranded siNAs, with the 5′-end of one antisense strand of the siNA is tethered to the 3′-end of the antisense strand of the other siNA molecule, such that the 5′-end of the one of the sense siNA strands annealed to their corresponding antisense sense strand that are tethered to each other at one end, faces the 3′-end of the other sense strand (see FIG. 22 (G-H)). In one embodiment, the linkage between the 5′-end of the first antisense strand and the 3′-end of the second antisense strand is designed in such a way as to be readily cleavable (e.g., biodegradable linker) such that the 5′ end of each antisense strand of the multifunctional siNA has a free 5′-end suitable to mediate RNA interference-based cleavage of the target RNA. The tethers or linkers can be nucleotide-based linkers or non-nucleotide based linkers as generally known in the art and as described herein.

[0557] In one embodiment, the invention features a multifunctional siNA, wherein the multifunctional siNA is assembled from two separate double-stranded siNAs, with the 5′-end of one antisense strand of the siNA is tethered to the 5′-end of the antisense strand of the other siNA molecule, such that the 3′-end of the one of the sense siNA strands annealed to their corresponding antisense sense strand that are tethered to each other at one end, faces the 3′-end of the other sense strand (see FIG. 22 (E)). In one embodiment, the linkage between the 5′-end of the first antisense strand and the 5′-end of the second antisense strand is designed in such a way as to be readily cleavable (e.g., biodegradable linker) such that the 5′ end of each antisense strand of the multifunctional siNA has a free 5′-end suitable to mediate RNA interference-based cleavage of the target RNA. The tethers or linkers can be nucleotide-based linkers or non-nucleotide based linkers as generally known in the art and as described herein.

[0558] In one embodiment, the invention features a multifunctional siNA, wherein the multifunctional siNA is assembled from two separate double-stranded siNAs, with the 3′-end of one antisense strand of the siNA is tethered to the 3′-end of the antisense strand of the other siNA molecule, such that the 5′-end of the one of the sense siNA strands annealed to their corresponding antisense sense strand that are tethered to each other at one end, faces the 3′-end of the other sense strand (see FIG. 22 (F)). In one embodiment, the linkage between the 5′-end of the first antisense strand and the 5′-end of the second antisense strand is designed in such a way as to be readily cleavable (e.g., biodegradable linker) such that the 5′ end of each antisense strand of the multifunctional siNA has a free 5′-end suitable to mediate RNA interference-based cleavage of the target RNA. The tethers or linkers can be nucleotide-based linkers or non-nucleotide based linkers as generally known in the art and as described herein.

[0559] In any of the above embodiments, a first target nucleic acid sequence or second target nucleic acid sequence can independently comprise HCV RNA or a portion thereof or a polynucleotide coding or non-coding sequence of cellular or host target that is involved in HCV infection or replication, or disease processes associated with HCV infection such as such as cellular receptors, cell surface molecules, cellular enzymes, cellular transcription factors, and/or cytokines, second messengers, and cellular accessory molecules including, but not limited to, La antigen (see for example Costa-Mattioli et al., 2004, Mol Cell Biol., 24, 6861-70, e.g., Genbank Accession No. NM_{—}003142); FAS (e.g., Genbank Accession No. NM_{—}000043) or FAS ligand (e.g., Genbank Accession No. NM_{—}000639); interferon regulatory factors (IRFs; e.g., Genbank Accession No. AF082503.1); cellular PKR protein kinase (e.g., Genbank Accession No. XM_{—}002661.7); human eukaryotic initiation factors 2B (elF2Bgamma; e.g., Genbank Accession No. AF256223, and/or elF2gamma; e.g., Genbank Accession No. NM_{—}006874.1); human DEAD Box protein (DDX3; e.g., Genbank Accession No. XM_{—}018021.2); and cellular proteins that bind to the poly(U) tract of the HCV 3′-UTR, such as polypyrimidine tract-binding protein (e.g., Genbank Accession Nos. NM_{—}031991.1 and XM_{—}042972.3). In one embodiment, the first HCV target nucleic acid sequence is a HCV RNA or a portion thereof and the second HCV target nucleic acid sequence is a HCV RNA of a portion thereof. In one embodiment, the first HCV target nucleic acid sequence is a HCV RNA or a portion thereof and the second HCV target nucleic acid sequence is a host RNA or a portion thereof. In one embodiment, the first HCV target nucleic acid sequence is a host RNA or a portion thereof and the second HCV target nucleic acid sequence is a host RNA or a portion thereof. In one embodiment, the first HCV target nucleic acid sequence is a host RNA or a portion thereof and the second HCV target nucleic acid sequence is a HCV RNA or a portion thereof.

### Synthesis of Nucleic Acid Molecules

[0560] Synthesis of nucleic acids greater than 100 nucleotides in length is difficult using automated methods, and the therapeutic cost of such molecules is prohibitive. In this invention, small nucleic acid motifs (“small” refers to nucleic acid motifs no more than 100 nucleotides in length, preferably no more than 80 nucleotides in length, and most preferably no more than 50 nucleotides in length; e.g., individual siNA oligonucleotide sequences or siNA sequences synthesized in tandem) are preferably used for exogenous delivery. The simple structure of these molecules increases the ability of the nucleic acid to invade targeted regions of protein and/or RNA structure. Exemplary molecules of the instant invention are chemically synthesized, and others can similarly be synthesized.

[0561] Oligonucleotides (e.g., certain modified oligonucleotides or portions of oligonucleotides lacking ribonucleotides) are synthesized using protocols known in the art, for example as described in Caruthers et al., 1992, Methods in Enzymology 211, 3-19, Thompson et al., International PCT Publication No. WO 99/54459, Wincott et al., 1995, Nucleic Acids Res. 23, 2677-2684, Wincott et al., 1997, Methods Mol. Bio., 74, 59, Brennan et al., 1998, Biotechnol Bioeng., 61, 33-45, and Brennan, U.S. Pat. No. 6,001,311. All of these references are incorporated herein by reference. The synthesis of oligonucleotides makes use of common nucleic acid protecting and coupling groups, such as dimethoxytrityl at the 5′-end, and phosphoramidites at the 3′-end. In a non-limiting example, small scale syntheses are conducted on a 394 Applied Biosystems, Inc. synthesizer using a 0.2 μmol scale protocol with a 2.5 min coupling step for 2′-O-methylated nucleotides and a 45 second coupling step for 2′-deoxy nucleotides or 2′-deoxy-2′-fluoro nucleotides. Table V outlines the amounts and the contact times of the reagents used in the synthesis cycle. Alternatively, syntheses at the 0.2 μmol scale can be performed on a 96-well plate synthesizer, such as the instrument produced by Protogene (Palo Alto, Calif.) with minimal modification to the cycle. A 33-fold excess (60 μL of 0.11 M=6.6 μmol) of 2′-O-methyl phosphoramidite and a 105-fold excess of S-ethyl tetrazole (60 μL of 0.25 M=15 μmol) can be used in each coupling cycle of 2′-O-methyl residues relative to polymer-bound 5′-hydroxyl. A 22-fold excess (40 μL of 0.11 M=4.4 μmol) of deoxy phosphoramidite and a 70-fold excess of S-ethyl tetrazole (40 μL of 0.25 M=10 μmol) can be used in each coupling cycle of deoxy residues relative to polymer-bound 5′-hydroxyl. Average coupling yields on the 394 Applied Biosystems, Inc. synthesizer, determined by colorimetric quantitation of the trityl fractions, are typically 97.5-99%. Other oligonucleotide synthesis reagents for the 394 Applied Biosystems, Inc. synthesizer include the following: detritylation solution is 3% TCA in methylene chloride (ABI); capping is performed with 16% N-methyl imidazole in THF (ABI) and 10% acetic anhydride/10% 2,6-lutidine in THF (ABI); and oxidation solution is 16.9 mM 12, 49 mM pyridine, 9% water in THF (PerSeptive Biosystems, Inc.). Burdick & Jackson Synthesis Grade acetonitrile is used directly from the reagent bottle. S-Ethyltetrazole solution (0.25 M in acetonitrile) is made up from the solid obtained from American International Chemical, Inc. Alternately, for the introduction of phosphorothioate linkages, Beaucage reagent (3H-1,2-Benzodithiol-3-one 1,1-dioxide, 0.05 M in acetonitrile) is used.

[0562] Deprotection of the DNA-based oligonucleotides is performed as follows: the polymer-bound trityl-on oligoribonucleotide is transferred to a 4 mL glass screw top vial and suspended in a solution of 40% aqueous methylamine (1 mL) at 65° C. for 10 minutes. After cooling to −20° C., the supernatant is removed from the polymer support. The support is washed three times with 1.0 mL of EtOH:MeCN:H2O/3:1:1, vortexed and the supernatant is then added to the first supernatant. The combined supernatants, containing the oligoribonucleotide, are dried to a white powder. In one embodiment, the nucleic acid molecules of the invention are synthesized, deprotected, and analyzed according to methods described in U.S. Pat. No. 6,995,259, U.S. Pat. No. 6,686,463, U.S. Pat. No. 6,673,918, U.S. Pat. No. 6,649,751, U.S. Pat. No. 6,989,442, and U.S. Ser. No. 10/190,359, all incorporated by reference herein in their entirety.

[0563] The method of synthesis used for RNA including certain siNA molecules of the invention follows the procedure as described in Usman et al., 1987, J. Am. Chem. Soc., 109, 7845; Scaringe et al., 1990, Nucleic Acids Res., 18, 5433; and Wincott et al., 1995, Nucleic Acids Res. 23, 2677-2684 Wincott et al., 1997, Methods Mol. Bio., 74, 59, and makes use of common nucleic acid protecting and coupling groups, such as dimethoxytrityl at the 5′-end, and phosphoramidites at the 3′-end. In a non-limiting example, small scale syntheses are conducted on a 394 Applied Biosystems, Inc. synthesizer using a 0.2 μmol scale protocol with a 7.5 min coupling step for alkylsilyl protected nucleotides and a 2.5 min coupling step for 2′-O-methylated nucleotides. Table V outlines the amounts and the contact times of the reagents used in the synthesis cycle. Alternatively, syntheses at the 0.2 μmol scale can be done on a 96-well plate synthesizer, such as the instrument produced by Protogene (Palo Alto, Calif.) with minimal modification to the cycle. A 33-fold excess (60 μL of 0.11 M=6.6 μmol) of 2′-O-methyl phosphoramidite and a 75-fold excess of S-ethyl tetrazole (60 μL of 0.25 M=15 μmol) can be used in each coupling cycle of 2′-O-methyl residues relative to polymer-bound 5′-hydroxyl. A 66-fold excess (120 μL of 0.11 M=13.2 μmol) of alkylsilyl (ribo) protected phosphoramidite and a 150-fold excess of S-ethyl tetrazole (120 μL of 0.25 M=30 μmol) can be used in each coupling cycle of ribo residues relative to polymer-bound 5′-hydroxyl. Average coupling yields on the 394 Applied Biosystems, Inc. synthesizer, determined by colorimetric quantitation of the trityl fractions, are typically 97.5-99%. Other oligonucleotide synthesis reagents for the 394 Applied Biosystems, Inc. synthesizer include the following: detritylation solution is 3% TCA in methylene chloride (ABI); capping is performed with 16% N-methyl imidazole in THF (ABI) and 10% acetic anhydride/10% 2,6-lutidine in THF (ABI); oxidation solution is 16.9 mM 12, 49 mM pyridine, 9% water in THF (PerSeptive Biosystems, Inc.). Burdick & Jackson Synthesis Grade acetonitrile is used directly from the reagent bottle. S-Ethyltetrazole solution (0.25 M in acetonitrile) is made up from the solid obtained from American International Chemical, Inc. Alternately, for the introduction of phosphorothioate linkages, Beaucage reagent (3H-1,2-Benzodithiol-3-one 1,1-dioxide 0.05 M in acetonitrile) is used.

[0564] Deprotection of the RNA is performed using either a two-pot or one-pot protocol. For the two-pot protocol, the polymer-bound trityl-on oligoribonucleotide is transferred to a 4 mL glass screw top vial and suspended in a solution of 40% aq. methylamine (1 mL) at 65° C. for 10 min. After cooling to −20° C., the supernatant is removed from the polymer support. The support is washed three times with 1.0 mL of EtOH:MeCN:H2O/3:1:1, vortexed and the supernatant is then added to the first supernatant. The combined supernatants, containing the oligoribonucleotide, are dried to a white powder. The base deprotected oligoribonucleotide is resuspended in anhydrous TEA/HF/NMP solution (300 μL of a solution of 1.5 mL N-methylpyrrolidinone, 750 μL TEA and 1 mL TEA-3HF to provide a 1.4 M HF concentration) and heated to 65° C. After 1.5 h, the oligomer is quenched with 1.5 M NH₄HCO₃. In one embodiment, the nucleic acid molecules of the invention are synthesized, deprotected, and analyzed according to methods described in U.S. Pat. No. 6,995,259, U.S. Pat. No. 6,686,463, U.S. Pat. No. 6,673,918, U.S. Pat. No. 6,649,751, U.S. Pat. No. 6,989,442, and U.S. Ser. No. 10/190,359, all incorporated by reference herein in their entirety.

[0565] Alternatively, for the one-pot protocol, the polymer-bound trityl-on oligoribonucleotide is transferred to a 4 mL glass screw top vial and suspended in a solution of 33% ethanolic methylamine/DMSO: 1/1 (0.8 mL) at 65° C. for 15 minutes. The vial is brought to room temperature TEA-3HF (0.1 mL) is added and the vial is heated at 65° C. for 15 minutes. The sample is cooled at −20° C. and then quenched with 1.5 M NH₄HCO₃.

[0566] For purification of the trityl-on oligomers, the quenched NH₄HCO₃ solution is loaded onto a C-18 containing cartridge that had been prewashed with acetonitrile followed by 50 mM TEAA. After washing the loaded cartridge with water, the RNA is detritylated with 0.5% TFA for 13 minutes. The cartridge is then washed again with water, salt exchanged with 1 M NaCl and washed with water again. The oligonucleotide is then eluted with 30% acetonitrile.

[0567] The average stepwise coupling yields are typically >98% (Wincott et al., 1995 Nucleic Acids Res. 23, 2677-2684). Those of ordinary skill in the art will recognize that the scale of synthesis can be adapted to be larger or smaller than the example described above including but not limited to 96-well format.

[0568] Alternatively, the nucleic acid molecules of the present invention can be synthesized separately and joined together post-synthetically, for example, by ligation (Moore et al., 1992, Science 256, 9923; Draper et al., International PCT publication No. WO 93/23569; Shabarova et al., 1991, Nucleic Acids Research 19, 4247; Bellon et al., 1997, Nucleosides & Nucleotides, 16, 951; Bellon et al., 1997, Bioconjugate Chem. 8, 204), or by hybridization following synthesis and/or deprotection.

[0569] The siNA molecules of the invention can also be synthesized via a tandem synthesis methodology as described in Example 1 herein, wherein both siNA strands are synthesized as a single contiguous oligonucleotide fragment or strand separated by a cleavable linker which is subsequently cleaved to provide separate siNA fragments or strands that hybridize and permit purification of the siNA duplex. The linker can be a polynucleotide linker or a non-nucleotide linker. The tandem synthesis of siNA as described herein can be readily adapted to both multiwell/multiplate synthesis platforms such as 96 well or similarly larger multi-well platforms. The tandem synthesis of siNA as described herein can also be readily adapted to large scale synthesis platforms employing batch reactors, synthesis columns and the like.

[0570] A siNA molecule can also be assembled from two distinct nucleic acid strands or fragments wherein one fragment includes the sense region and the second fragment includes the antisense region of the RNA molecule.

[0571] The nucleic acid molecules of the present invention can be modified extensively to enhance stability by modification with nuclease resistant groups, for example, 2′-amino, 2′-C-allyl, 2′-fluoro, 2′-O-methyl, 2′-H (for a review see Usman and Cedergren, 1992, TIBS 17, 34; Usman et al., 1994, Nucleic Acids Symp. Ser. 31, 163). siNA constructs can be purified by gel electrophoresis using general methods or can be purified by high pressure liquid chromatography (HPLC; see Wincott et al., supra, the totality of which is hereby incorporated herein by reference) and re-suspended in water.

[0572] In another aspect of the invention, siNA molecules of the invention are expressed from transcription units inserted into DNA or RNA vectors. The recombinant vectors can be DNA plasmids or viral vectors. siNA expressing viral vectors can be constructed based on, but not limited to, adeno-associated virus, retrovirus, adenovirus, or alphavirus. The recombinant vectors capable of expressing the siNA molecules can be delivered as described herein, and persist in target cells. Alternatively, viral vectors can be used that provide for transient expression of siNA molecules.

### Optimizing Activity of the Nucleic Acid Molecule of the Invention.

[0573] Chemically synthesizing nucleic acid molecules with modifications (base, sugar and/or phosphate) can prevent their degradation by serum ribonucleases, which can increase their potency (see e.g., Eckstein et al., International Publication No. WO 92/07065; Perrault et al., 1990 Nature 344, 565; Pieken et al., 1991, Science 253, 314; Usman and Cedergren, 1992, Trends in Biochem. Sci. 17, 334; Usman et al., International Publication No. WO 93/15187; and Rossi et al., International Publication No. WO 91/03162; Sproat, U.S. Pat. No. 5,334,711; Gold et al., U.S. Pat. No. 6,300,074; and Burgin et al., supra; all of which are incorporated by reference herein). All of the above references describe various chemical modifications that can be made to the base, phosphate and/or sugar moieties of the nucleic acid molecules described herein. Modifications that enhance their efficacy in cells, and removal of bases from nucleic acid molecules to shorten oligonucleotide synthesis times and reduce chemical requirements are desired.

[0574] There are several examples in the art describing sugar, base and phosphate modifications that can be introduced into nucleic acid molecules with significant enhancement in their nuclease stability and efficacy. For example, oligonucleotides are modified to enhance stability and/or enhance biological activity by modification with nuclease resistant groups, for example, 2′-amino, 2′-C-allyl, 2′-fluoro, 2′-O-methyl, 2′-O-allyl, 2′-H, nucleotide base modifications (for a review see Usman and Cedergren, 1992, TIBS. 17, 34; Usman et al., 1994, Nucleic Acids Symp. Ser. 31, 163; Burgin et al., 1996, Biochemistry, 35, 14090). Sugar modification of nucleic acid molecules have been extensively described in the art (see Eckstein et al., International Publication PCT No. WO 92/07065; Perrault et al. Nature, 1990, 344, 565-568; Pieken et al. Science, 1991, 253, 314-317; Usman and Cedergren, Trends in Biochem. Sci., 1992, 17, 334-339; Usman et al. International Publication PCT No. WO 93/15187; Sproat, U.S. Pat. No. 5,334,711 and Beigelman et al., 1995, J. Biol. Chem., 270, 25702; Beigelman et al., International PCT publication No. WO 97/26270; Beigelman et al., U.S. Pat. No. 5,716,824; Usman et al., U.S. Pat. No. 5,627,053; Woolf et al., International PCT Publication No. WO 98/13526; Thompson et al., U.S. Ser. No. 60/082,404 which was filed on Apr. 20, 1998; Karpeisky et al., 1998, Tetrahedron Lett., 39, 1131; Earnshaw and Gait, 1998, Biopolymers (Nucleic Acid Sciences), 48, 39-55; Verma and Eckstein, 1998, Annu. Rev. Biochem., 67, 99-134; and Burlina et al., 1997, Bioorg. Med. Chem., 5, 1999-2010; all of the references are hereby incorporated in their totality by reference herein). Such publications describe general methods and strategies to determine the location of incorporation of sugar, base and/or phosphate modifications and the like into nucleic acid molecules without modulating catalysis, and are incorporated by reference herein. In view of such teachings, similar modifications can be used as described herein to modify the siNA nucleic acid molecules of the instant invention so long as the ability of siNA to promote RNAI is cells is not significantly inhibited.

[0575] In one embodiment, a nucleic acid molecule of the invention is chemically modified as described in US 20050020521, incorporated by reference herein in its entirety.

[0576] While chemical modification of oligonucleotide internucleotide linkages with phosphorothioate, phosphorodithioate, and/or 5′-methylphosphonate linkages improves stability, excessive modifications can cause some toxicity or decreased activity. Therefore, when designing nucleic acid molecules, the amount of these internucleotide linkages should be minimized. The reduction in the concentration of these linkages should lower toxicity, resulting in increased efficacy and higher specificity of these molecules.

[0577] Short interfering nucleic acid (siNA) molecules having chemical modifications that maintain or enhance activity are provided. Such a nucleic acid is also generally more resistant to nucleases than an unmodified nucleic acid. Accordingly, the in vitro and/or in vivo activity should not be significantly lowered. In cases in which modulation is the goal, therapeutic nucleic acid molecules delivered exogenously should optimally be stable within cells until translation of the target RNA has been modulated long enough to reduce the levels of the undesirable protein. This period of time varies between hours to days depending upon the disease state. Improvements in the chemical synthesis of RNA and DNA (Wincott et al., 1995, Nucleic Acids Res. 23, 2677; Caruthers et al., 1992, Methods in Enzymology 211, 3-19 (incorporated by reference herein)) have expanded the ability to modify nucleic acid molecules by introducing nucleotide modifications to enhance their nuclease stability, as described above.

[0578] In one embodiment, nucleic acid molecules of the invention include one or more (e.g., about 1, 2, 3, 4, 5, 6, 7, 8, 9, 10, or more) G-clamp nucleotides. A G-clamp nucleotide is a modified cytosine analog wherein the modifications confer the ability to hydrogen bond both Watson-Crick and Hoogsteen faces of a complementary guanine within a duplex, see for example Lin and Matteucci, 1998, J. Am. Chem. Soc., 120, 8531-8532. A single G-clamp analog substitution within an oligonucleotide can result in substantially enhanced helical thermal stability and mismatch discrimination when hybridized to complementary oligonucleotides. The inclusion of such nucleotides in nucleic acid molecules of the invention results in both enhanced affinity and specificity to nucleic acid targets, complementary sequences, or template strands. In another embodiment, nucleic acid molecules of the invention include one or more (e.g., about 1, 2, 3, 4, 5, 6, 7, 8, 9, 10, or more) LNA “locked nucleic acid” nucleotides such as a 2′,4′-C methylene bicyclo nucleotide (see for example Wengel et al., International PCT Publication No. WO 00/66604 and WO 99/14226).

[0579] In another embodiment, the invention features conjugates and/or complexes of siNA molecules of the invention. Such conjugates and/or complexes can be used to facilitate delivery of siNA molecules into a biological system, such as a cell. The conjugates and complexes provided by the instant invention can impart therapeutic activity by transferring therapeutic compounds across cellular membranes, altering the pharmacokinetics, and/or modulating the localization of nucleic acid molecules of the invention. The present invention encompasses the design and synthesis of novel conjugates and complexes for the delivery of molecules, including, but not limited to, small molecules, lipids, cholesterol, phospholipids, nucleosides, nucleotides, nucleic acids, antibodies, toxins, negatively charged polymers and other polymers, for example proteins, peptides, hormones, carbohydrates, polyethylene glycols, or polyamines, across cellular membranes. In general, the transporters described are designed to be used either individually or as part of a multi-component system, with or without degradable linkers. These compounds are expected to improve delivery and/or localization of nucleic acid molecules of the invention into a number of cell types originating from different tissues, in the presence or absence of serum (see Sullenger and Cech, U.S. Pat. No. 5,854,038). Conjugates of the molecules described herein can be attached to biologically active molecules via linkers that are biodegradable, such as biodegradable nucleic acid linker molecules.

[0580] The term “biodegradable linker” as used herein, refers to a nucleic acid or non-nucleic acid linker molecule that is designed as a biodegradable linker to connect one molecule to another molecule, for example, a biologically active molecule to a siNA molecule of the invention or the sense and antisense strands of a siNA molecule of the invention. The biodegradable linker is designed such that its stability can be modulated for a particular purpose, such as delivery to a particular tissue or cell type. The stability of a nucleic acid-based biodegradable linker molecule can be modulated by using various chemistries, for example combinations of ribonucleotides, deoxyribonucleotides, and chemically-modified nucleotides, such as 2′-O-methyl, 2′-fluoro, 2′-amino, 2′-O-amino, 2′-C-allyl, 2′-O-allyl, and other 2′-modified or base modified nucleotides. The biodegradable nucleic acid linker molecule can be a dimer, trimer, tetramer or longer nucleic acid molecule, for example, an oligonucleotide of about 2, 3, 4, 5, 6, 7, 8, 9, 10, 11, 12, 13, 14, 15, 16, 17, 18, 19, or 20 nucleotides in length, or can comprise a single nucleotide with a phosphorus-based linkage, for example, a phosphoramidate or phosphodiester linkage. The biodegradable nucleic acid linker molecule can also comprise nucleic acid backbone, nucleic acid sugar, or nucleic acid base modifications.

[0581] The term “biodegradable” as used herein, refers to degradation in a biological system, for example, enzymatic degradation or chemical degradation.

[0582] The term “biologically active molecule” as used herein refers to compounds or molecules that are capable of eliciting or modifying a biological response in a system. Non-limiting examples of biologically active siNA molecules either alone or in combination with other molecules contemplated by the instant invention include therapeutically active molecules such as antibodies, cholesterol, hormones, antivirals, peptides, proteins, chemotherapeutics, small molecules, vitamins, co-factors, nucleosides, nucleotides, oligonucleotides, enzymatic nucleic acids, antisense nucleic acids, triplex forming oligonucleotides, 2,5-A chimeras, siNA, dsRNA, allozymes, aptamers, decoys and analogs thereof. Biologically active molecules of the invention also include molecules capable of modulating the pharmacokinetics and/or pharmacodynamics of other biologically active molecules, for example, lipids and polymers such as polyamines, polyamides, polyethylene glycol and other polyethers.

[0583] The term “phospholipid” as used herein, refers to a hydrophobic molecule comprising at least one phosphorus group. For example, a phospholipid can comprise a phosphorus-containing group and saturated or unsaturated alkyl group, optionally substituted with OH, COOH, oxo, amine, or substituted or unsubstituted aryl groups.

[0584] Therapeutic nucleic acid molecules (e.g., siNA molecules) delivered exogenously optimally are stable within cells until reverse transcription of the RNA has been modulated long enough to reduce the levels of the RNA transcript. The nucleic acid molecules are resistant to nucleases in order to function as effective intracellular therapeutic agents. Improvements in the chemical synthesis of nucleic acid molecules described in the instant invention and in the art have expanded the ability to modify nucleic acid molecules by introducing nucleotide modifications to enhance their nuclease stability as described above.

[0585] In yet another embodiment, siNA molecules having chemical modifications that maintain or enhance enzymatic activity of proteins involved in RNAi are provided. Such nucleic acids are also generally more resistant to nucleases than unmodified nucleic acids. Thus, in vitro and/or in vivo the activity should not be significantly lowered.

[0586] Use of the nucleic acid-based molecules of the invention will lead to better treatments by affording the possibility of combination therapies (e.g., multiple siNA molecules targeted to different genes; nucleic acid molecules coupled with known small molecule modulators; or intermittent treatment with combinations of molecules, including different motifs and/or other chemical or biological molecules). The treatment of subjects with siNA molecules can also include combinations of different types of nucleic acid molecules, such as enzymatic nucleic acid molecules (ribozymes), allozymes, antisense, 2,5-A oligoadenylate, decoys, and aptamers.

[0587] In another aspect a siNA molecule of the invention comprises one or more 5′ and/or a 3′-cap structure, for example, on only the sense siNA strand, the antisense siNA strand, or both siNA strands.

[0588] By “cap structure” is meant chemical modifications, which have been incorporated at either terminus of the oligonucleotide (see, for example, Adamic et al., U.S. Pat. No. 5,998,203, incorporated by reference herein). These terminal modifications protect the nucleic acid molecule from exonuclease degradation, and may help in delivery and/or localization within a cell. The cap may be present at the 5′-terminus (5′-cap) or at the 3′-terminal (3′-cap) or may be present on both termini. In non-limiting examples, the 5′-cap includes, but is not limited to, glyceryl, inverted deoxy abasic residue (moiety); 4′,5′-methylene nucleotide; 1-(beta-D-erythrofuranosyl) nucleotide, 4′-thio nucleotide; carbocyclic nucleotide; 1,5-anhydrohexitol nucleotide; L-nucleotides; alpha-nucleotides; modified base nucleotide; phosphorodithioate linkage; threo-pentofuranosyl nucleotide; acyclic 3′,4′-seco nucleotide; acyclic 3,4-dihydroxybutyl nucleotide; acyclic 3,5-dihydroxypentyl nucleotide, 3′-3′-inverted nucleotide moiety; 3′-3′-inverted abasic moiety; 3′-2′-inverted nucleotide moiety; 3′-2′-inverted abasic moiety; 1,4-butanediol phosphate; 3′-phosphoramidate; hexylphosphate; aminohexyl phosphate; 3′-phosphate; 3′-phosphorothioate; phosphorodithioate; or bridging or non-bridging methylphosphonate moiety. Non-limiting examples of cap moieties are shown in FIG. 10.

[0589] Non-limiting examples of the 3′-cap include, but are not limited to, glyceryl, inverted deoxy abasic residue (moiety), 4′,5′-methylene nucleotide; 1-(beta-D-erythrofuranosyl) nucleotide; 4′-thio nucleotide, carbocyclic nucleotide; 5′-amino-alkyl phosphate; 1,3-diamino-2-propyl phosphate; 3-aminopropyl phosphate; 6-aminohexyl phosphate; 1,2-aminododecyl phosphate; hydroxypropyl phosphate; 1,5-anhydrohexitol nucleotide; L-nucleotide; alpha-nucleotide; modified base nucleotide; phosphorodithioate; threo-pentofuranosyl nucleotide; acyclic 3′,4′-seco nucleotide; 3,4-dihydroxybutyl nucleotide; 3,5-dihydroxypentyl nucleotide, 5′-5′-inverted nucleotide moiety; 5′-5′-inverted abasic moiety; 5′-phosphoramidate; 5′-phosphorothioate; 1,4-butanediol phosphate; 5′-amino; bridging and/or non-bridging 5′-phosphoramidate, phosphorothioate and/or phosphorodithioate, bridging or non bridging methylphosphonate and 5′-mercapto moieties (for more details see Beaucage and Iyer, 1993, Tetrahedron 49, 1925; incorporated by reference herein).

[0590] By the term “non-nucleotide” is meant any group or compound which can be incorporated into a nucleic acid chain in the place of one or more nucleotide units, including either sugar and/or phosphate substitutions, and allows the remaining bases to exhibit their enzymatic activity. The group or compound is abasic in that it does not contain a commonly recognized nucleotide base, such as adenosine, guanine, cytosine, uracil or thymine and therefore lacks a base at the 1′-position.

[0591] An “alkyl” group refers to a saturated aliphatic hydrocarbon, including straight-chain, branched-chain, and cyclic alkyl groups. Preferably, the alkyl group has 1 to 12 carbons. More preferably, it is a lower alkyl of from 1 to 7 carbons, more preferably 1 to 4 carbons. The alkyl group can be substituted or unsubstituted. When substituted the substituted group(s) is preferably, hydroxyl, cyano, alkoxy, ═O, ═S, NO₂ or N(CH₃)₂, amino, or SH. The term also includes alkenyl groups that are unsaturated hydrocarbon groups containing at least one carbon-carbon double bond, including straight-chain, branched-chain, and cyclic groups. Preferably, the alkenyl group has 1 to 12 carbons. More preferably, it is a lower alkenyl of from 1 to 7 carbons, more preferably 1 to 4 carbons. The alkenyl group may be substituted or unsubstituted. When substituted the substituted group(s) is preferably, hydroxyl, cyano, alkoxy, ═O, ═S, NO₂, halogen, N(CH₃)₂, amino, or SH. The term “alkyl” also includes alkynyl groups that have an unsaturated hydrocarbon group containing at least one carbon-carbon triple bond, including straight-chain, branched-chain, and cyclic groups. Preferably, the alkynyl group has 1 to 12 carbons. More preferably, it is a lower alkynyl of from 1 to 7 carbons, more preferably 1 to 4 carbons. The alkynyl group may be substituted or unsubstituted. When substituted the substituted group(s) is preferably, hydroxyl, cyano, alkoxy, ═O, ═S, NO₂ or N(CH₃)₂, amino or SH.

[0592] Such alkyl groups can also include aryl, alkylaryl, carbocyclic aryl, heterocyclic aryl, amide and ester groups. An “aryl” group refers to an aromatic group that has at least one ring having a conjugated pi electron system and includes carbocyclic aryl, heterocyclic aryl and biaryl groups, all of which may be optionally substituted. The preferred substituent(s) of aryl groups are halogen, trihalomethyl, hydroxyl, SH, OH, cyano, alkoxy, alkyl, alkenyl, alkynyl, and amino groups. An “alkylaryl” group refers to an alkyl group (as described above) covalently joined to an aryl group (as described above). Carbocyclic aryl groups are groups wherein the ring atoms on the aromatic ring are all carbon atoms. The carbon atoms are optionally substituted. Heterocyclic aryl groups are groups having from 1 to 3 heteroatoms as ring atoms in the aromatic ring and the remainder of the ring atoms are carbon atoms. Suitable heteroatoms include oxygen, sulfur, and nitrogen, and include furanyl, thienyl, pyridyl, pyrrolyl, N-lower alkyl pyrrolo, pyrimidyl, pyrazinyl, imidazolyl and the like, all optionally substituted. An “amide” refers to an —C(O)—NH—R, where R is either alkyl, aryl, alkylaryl or hydrogen. An “ester” refers to an —C(O)—OR′, where R is either alkyl, aryl, alkylaryl or hydrogen.

[0593] By “nucleotide” as used herein is as recognized in the art to include natural bases (standard), and modified bases well known in the art. Such bases are generally located at the 1′ position of a nucleotide sugar moiety. Nucleotides generally comprise a base, sugar and a phosphate group. The nucleotides can be unmodified or modified at the sugar, phosphate and/or base moiety, (also referred to interchangeably as nucleotide analogs, modified nucleotides, non-natural nucleotides, non-standard nucleotides and other; see, for example, Usman and McSwiggen, supra; Eckstein et al., International PCT Publication No. WO 92/07065; Usman et al., International PCT Publication No. WO 93/15187; Uhlman & Peyman, supra, all are hereby incorporated by reference herein). There are several examples of modified nucleic acid bases known in the art as summarized by Limbach et al., 1994, Nucleic Acids Res. 22, 2183. Some of the non-limiting examples of base modifications that can be introduced into nucleic acid molecules include, inosine, purine, pyridin-4-one, pyridin-2-one, phenyl, pseudouracil, 2,4,6-trimethoxy benzene, 3-methyl uracil, dihydrouridine, naphthyl, aminophenyl, 5-alkylcytidines (e.g., 5-methylcytidine), 5-alkyluridines (e.g., ribothymidine), 5-halouridine (e.g., 5-bromouridine) or 6-azapyrimidines or 6-alkylpyrimidines (e.g. 6-methyluridine), propyne, and others (Burgin et al., 1996, Biochemistry, 35, 14090; Uhlman & Peyman, supra). By “modified bases” in this aspect is meant nucleotide bases other than adenine, guanine, cytosine and uracil at 1′ position or their equivalents.

[0594] In one embodiment, the invention features modified siNA molecules, with phosphate backbone modifications comprising one or more phosphorothioate, phosphorodithioate, methylphosphonate, phosphotriester, morpholino, amidate carbamate, carboxymethyl, acetamidate, polyamide, sulfonate, sulfonamide, sulfamate, formacetal, thioformacetal, and/or alkylsilyl, substitutions. For a review of oligonucleotide backbone modifications, see Hunziker and Leumann, 1995, Nucleic Acid Analogues: Synthesis and Properties, in Modern Synthetic Methods, VCH, 331-417, and Mesmaeker et al., 1994, Novel Backbone Replacements for Oligonucleotides, in Carbohydrate Modifications in Antisense Research, ACS, 24-39.

[0595] By “abasic” is meant sugar moieties lacking a nucleobase or having a hydrogen atom (H) or other other non-nucleobase chemical groups in place of a nucleobase at the 1′ position of the sugar moiety, see for example Adamic et al., U.S. Pat. No. 5,998,203. In one embodiment, an abasic moiety of the invention is a ribose, deoxyribose, or dideoxyribose sugar.

[0596] By “unmodified nucleoside” is meant one of the bases adenine, cytosine, guanine, thymine, or uracil joined to the 1′ carbon of β-D-ribo-furanose.

[0597] By “modified nucleoside” is meant any nucleotide base which contains a modification in the chemical structure of an unmodified nucleotide base, sugar and/or phosphate. Non-limiting examples of modified nucleotides are shown by Formulae I-VII and/or other modifications described herein.

[0598] In connection with 2′-modified nucleotides as described for the present invention, by “amino” is meant 2′—NH₂ or 2′-O—NH₂, which can be modified or unmodified. Such modified groups are described, for example, in Eckstein et al., U.S. Pat. No. 5,672,695 and Matulic-Adamic et al., U.S. Pat. No. 6,248,878, which are both incorporated by reference in their entireties.

[0599] Various modifications to nucleic acid siNA structure can be made to enhance the utility of these molecules. Such modifications will enhance shelf-life, half-life in vitro, stability, and ease of introduction of such oligonucleotides to the target site, e.g., to enhance penetration of cellular membranes, and confer the ability to recognize and bind to targeted cells.

### Administration of Nucleic Acid Molecules

[0600] A siNA molecule of the invention can be adapted for use to treat, prevent, inhibit, or reduce HCV infection, liver failure, hepatocellular carcinoma, cirrhosis and/or any other trait, disease or condition that is related to or will respond to the levels of HCV in a cell or tissue, alone or in combination with other therapies. In one embodiment, the siNA molecules of the invention and formulations or compositions thereof are administered to the liver as is generally known in the art (see for example Wen et al., 2004, World J Gastroenterol., 10, 244-9; Murao et al., 2002, Pharm Res., 19, 1808-14; Liu et al., 2003, Gene Ther., 10, 180-7; Hong et al., 2003, J Pharm Pharmacol., 54, 51-8; Herrmann et al., 2004, Arch Virol., 149, 1611-7; and Matsuno et al., 2003, Gene Ther., 10, 1559-66).

[0601] In one embodiment, a siNA composition of the invention can comprise a delivery vehicle, including liposomes, for administration to a subject, carriers and diluents and their salts, and/or can be present in pharmaceutically acceptable formulations. Methods for the delivery of nucleic acid molecules are described in Akhtar et al., 1992, Trends Cell Bio., 2, 139; Delivery Strategies for Antisense Oligonucleotide Therapeutics, ed. Akhtar, 1995, Maurer et al., 1999, Mol. Membr. Biol., 16, 129-140; Hofland and Huang, 1999, Handb. Exp. Pharmacol., 137, 165-192; and Lee et al., 2000, ACS Symp. Ser., 752, 184-192, all of which are incorporated herein by reference. Beigelman et al., U.S. Pat. No. 6,395,713 and Sullivan et al., PCT WO 94/02595 further describe the general methods for delivery of nucleic acid molecules. These protocols can be utilized for the delivery of virtually any nucleic acid molecule. Nucleic acid molecules can be administered to cells by a variety of methods known to those of skill in the art, including, but not restricted to, encapsulation in liposomes, by iontophoresis, or by incorporation into other vehicles, such as biodegradable polymers, hydrogels, cyclodextrins (see for example Gonzalez et al., 1999, Bioconjugate Chem., 10, 1068-1074; Wang et al., International PCT publication Nos. WO 03/47518 and WO 03/46185), poly(lactic-co-glycolic)acid (PLGA) and PLCA microspheres (see for example U.S. Pat. No. 6,447,796 and US Patent Application Publication No. US 2002130430), biodegradable nanocapsules, and bioadhesive microspheres, or by proteinaceous vectors (O'Hare and Normand, International PCT Publication No. WO 00/53722). In another embodiment, the nucleic acid molecules of the invention can also be formulated or complexed with polyethyleneimine and derivatives thereof, such as polyethyleneimine-polyethyleneglycol-N-acetylgalactosamine (PEI-PEG-GAL) or polyethyleneimine-polyethyleneglycol-tri-N-acetylgalactosamine (PEI-PEG-triGAL) derivatives. In one embodiment, the nucleic acid molecules of the invention are formulated as described in United States Patent Application Publication No. 20030077829, incorporated by reference herein in its entirety.

[0602] In one embodiment, a siNA molecule of the invention is formulated as a composition described in U.S. Provisional patent application No. 60/678,531 and in related U.S. Provisional patent application No. 60/703,946, filed Jul. 29, 2005, U.S. Provisional patent application No. 60/737,024, filed Nov. 15, 2005, and U.S. Ser. No. 11/353,630, filed Feb. 14, 2006 (Vargeese et al.), all of which are incorporated by reference herein in their entirety. Such siNA formulations are generally referred to as “lipid nucleic acid particles” (LNP). In one embodiment, a siNA molecule of the invention is formulated with one or more LNP compositions described herein in Table VI (see U.S. Ser. No. 11/353,630 supra).

[0603] In one embodiment, the siNA molecules of the invention and formulations or compositions thereof are administered to lung tissues and cells as is described in US 2006/0062758; US 2006/0014289; and US 2004/0077540.

[0604] In one embodiment, a siNA molecule of the invention is complexed with membrane disruptive agents such as those described in U.S. Patent Application Publication No. 20010007666, incorporated by reference herein in its entirety including the drawings. In another embodiment, the membrane disruptive agent or agents and the siNA molecule are also complexed with a cationic lipid or helper lipid molecule, such as those lipids described in U.S. Pat. No. 6,235,310, incorporated by reference herein in its entirety including the drawings.

[0605] In one embodiment, a siNA molecule of the invention is complexed with delivery systems as described in U.S. Patent Application Publication No. 2003077829 and International PCT Publication Nos. WO 00/03683 and WO 02/087541, all incorporated by reference herein in their entirety including the drawings.

[0606] In one embodiment, a siNA molecule of the invention is complexed with delivery systems as is generally described in U.S. Patent Application Publication Nos. US-20050287551; US-20050164220; US-20050191627; US-20050118594; US-20050153919; US-20050085486; and US-20030158133; all incorporated by reference herein in their entirety including the drawings.

[0607] In one embodiment, the nucleic acid molecules of the invention are administered to skeletal tissues (e.g., bone, cartilage, tendon, ligament) or bone metastatic tumors via atelocollagen complexation or conjugation (see for example Takeshita et al., 2005, PNAS, 102, 12177-12182). Therefore, in one embodiment, the instant invention features one or more dsiNA molecules as a composition complexed with atelocollagen. In another embodiment, the instant invention features one or more siNA molecules conjugated to atelocollagen via a linker as described herein or otherwise known in the art.

[0608] In one embodiment, the nucleic acid molecules of the invention and formulations thereof (e.g., LNP formulations of double stranded nucleic acid molecules of the invention) are administered via pulmonary delivery, such as by inhalation of an aerosol or spray dried formulation administered by an inhalation device or nebulizer, providing rapid local uptake of the nucleic acid molecules into relevant pulmonary tissues. Solid particulate compositions containing respirable dry particles of micronized nucleic acid compositions can be prepared by grinding dried or lyophilized nucleic acid compositions, and then passing the micronized composition through, for example, a 400 mesh screen to break up or separate out large agglomerates. A solid particulate composition comprising the nucleic acid compositions of the invention can optionally contain a dispersant which serves to facilitate the formation of an aerosol as well as other therapeutic compounds. A suitable dispersant is lactose, which can be blended with the nucleic acid compound in any suitable ratio, such as a 1 to 1 ratio by weight.

[0609] Aerosols of liquid particles comprising a nucleic acid composition of the invention can be produced by any suitable means, such as with a nebulizer (see for example U.S. Pat. No. 4,501,729). Nebulizers are commercially available devices which transform solutions or suspensions of an active ingredient into a therapeutic aerosol mist either by means of acceleration of a compressed gas, typically air or oxygen, through a narrow venturi orifice or by means of ultrasonic agitation. Suitable formulations for use in nebulizers comprise the active ingredient in a liquid carrier in an amount of up to 40% w/w preferably less than 20% w/w of the formulation. The carrier is typically water or a dilute aqueous alcoholic solution, preferably made isotonic with body fluids by the addition of, for example, sodium chloride or other suitable salts. Optional additives include preservatives if the formulation is not prepared sterile, for example, methyl hydroxybenzoate, anti-oxidants, flavorings, volatile oils, buffering agents and emulsifiers and other formulation surfactants. The aerosols of solid particles comprising the active composition and surfactant can likewise be produced with any solid particulate aerosol generator. Aerosol generators for administering solid particulate therapeutics to a subject produce particles which are respirable, as explained above, and generate a volume of aerosol containing a predetermined metered dose of a therapeutic composition at a rate suitable for human administration.

[0610] In one embodiment, a solid particulate aerosol generator of the invention is an insufflator. Suitable formulations for administration by insufflation include finely comminuted powders which can be delivered by means of an insufflator. In the insufflator, the powder, e.g., a metered dose thereof effective to carry out the treatments described herein, is contained in capsules or cartridges, typically made of gelatin or plastic, which are either pierced or opened in situ and the powder delivered by air drawn through the device upon inhalation or by means of a manually-operated pump. The powder employed in the insufflator consists either solely of the active ingredient or of a powder blend comprising the active ingredient, a suitable powder diluent, such as lactose, and an optional surfactant. The active ingredient typically comprises from 0.1 to 100 w/w of the formulation. A second type of illustrative aerosol generator comprises a metered dose inhaler. Metered dose inhalers are pressurized aerosol dispensers, typically containing a suspension or solution formulation of the active ingredient in a liquified propellant. During use these devices discharge the formulation through a valve adapted to deliver a metered volume to produce a fine particle spray containing the active ingredient. Suitable propellants include certain chlorofluorocarbon compounds, for example, dichlorodifluoromethane, trichlorofluoromethane, dichlorotetrafluoroethane and mixtures thereof. The formulation can additionally contain one or more co-solvents, for example, ethanol, emulsifiers and other formulation surfactants, such as oleic acid or sorbitan trioleate, anti-oxidants and suitable flavoring agents. Other methods for pulmonary delivery are described in, for example US Patent Application No. 20040037780, and U.S. Pat. Nos. 6,592,904; 6,582,728; 6,565,885, all incorporated by reference herein.

[0611] In one embodiment, the siNA and LNP compositions and formulations provided herein for use in pulmonary delivery further comprise one or more surfactants. Suitable surfactants or surfactant components for enhancing the uptake of the compositions of the invention include synthetic and natural as well as full and truncated forms of surfactant protein A, surfactant protein B, surfactant protein C, surfactant protein D and surfactant Protein E, di-saturated phosphatidylcholine (other than dipalmitoyl), dipalmitoylphosphatidylchol-ine, phosphatidylcholine, phosphatidylglycerol, phosphatidylinositol, phosphatidylethanolamine, phosphatidylserine; phosphatidic acid, ubiquinones, lysophosphatidylethanolamine, lysophosphatidylcholine, palmitoyl-lysophosphatidylcholine, dehydroepiandrosterone, dolichols, sulfatidic acid, glycerol-3-phosphate, dihydroxyacetone phosphate, glycerol, glycero-3-phosphocholine, dihydroxyacetone, palmitate, cytidine diphosphate (CDP) diacylglycerol, CDP choline, choline, choline phosphate; as well as natural and artificial lamelar bodies which are the natural carrier vehicles for the components of surfactant, omega-3 fatty acids, polyenic acid, polyenoic acid, lecithin, palmitinic acid, non-ionic block copolymers of ethylene or propylene oxides, polyoxypropylene, monomeric and polymeric, polyoxyethylene, monomeric and polymeric, poly (vinyl amine) with dextran and/or alkanoyl side chains, Brij 35, Triton X-100 and synthetic surfactants ALEC, Exosurf, Survan and Atovaquone, among others. These surfactants may be used either as single or part of a multiple component surfactant in a formulation, or as covalently bound additions to the 5′ and/or 3′ ends of the nucleic acid component of a pharmaceutical composition herein.

[0612] The composition of the present invention may be administered into the respiratory system as a formulation including particles of respirable size, e.g. particles of a size sufficiently small to pass through the nose, mouth and larynx upon inhalation and through the bronchi and alveoli of the lungs. In general, respirable particles range from about 0.5 to 10 microns in size. Particles of non-respirable size which are included in the aerosol tend to deposit in the throat and be swallowed, and the quantity of non-respirable particles in the aerosol is thus minimized. For nasal administration, a particle size in the range of 10-500 um is preferred to ensure retention in the nasal cavity.

[0613] In one embodiment, the invention features the use of methods to deliver the nucleic acid molecules of the instant invention to the central nervous system and/or peripheral nervous system. Experiments have demonstrated the efficient in vivo uptake of nucleic acids by neurons. As an example of local administration of nucleic acids to nerve cells, Sommer et al., 1998, Antisense Nuc. Acid Drug Dev., 8, 75, describe a study in which a 15mer phosphorothioate antisense nucleic acid molecule to c-fos is administered to rats via microinjection into the brain. Antisense molecules labeled with tetramethylrhodamine-isothiocyanate (TRITC) or fluorescein isothiocyanate (FITC) were taken up by exclusively by neurons thirty minutes post-injection. A diffuse cytoplasmic staining and nuclear staining was observed in these cells. As an example of systemic administration of nucleic acid to nerve cells, Epa et al., 2000, Antisense Nuc. Acid Drug Dev., 10, 469, describe an in vivo mouse study in which beta-cyclodextrin-adamantane-oligonucleotide conjugates were used to target the p75 neurotrophin receptor in neuronally differentiated PC12 cells. Following a two week course of IP administration, pronounced uptake of p75 neurotrophin receptor antisense was observed in dorsal root ganglion (DRG) cells. In addition, a marked and consistent down-regulation of p75 was observed in DRG neurons. Additional approaches to the targeting of nucleic acid to neurons are described in Broaddus et al., 1998, J. Neurosurg., 88(4), 734; Karle et al., 1997, Eur. J. Pharmocol., 340(2/3), 153; Bannai et al., 1998, Brain Research, 784(1,2), 304; Rajakumar et al., 1997, Synapse, 26(3), 199; Wu-pong et al., 1999, BioPharm, 12(1), 32; Bannai et al., 1998, Brain Res. Protoc., 3(1), 83; Simantov et al., 1996, Neuroscience, 74(1), 39. Nucleic acid molecules of the invention are therefore amenable to delivery to and uptake by cells that express repeat expansion allelic variants for modulation of RE gene expression. The delivery of nucleic acid molecules of the invention, targeting RE is provided by a variety of different strategies. Traditional approaches to CNS delivery that can be used include, but are not limited to, intrathecal and intracerebroventricular administration, implantation of catheters and pumps, direct injection or perfusion at the site of injury or lesion, injection into the brain arterial system, or by chemical or osmotic opening of the blood-brain barrier. Other approaches can include the use of various transport and carrier systems, for example though the use of conjugates and biodegradable polymers. Furthermore, gene therapy approaches, for example as described in Kaplitt et al., U.S. Pat. No. 6,180,613 and Davidson, WO 04/013280, can be used to express nucleic acid molecules in the CNS.

[0614] The delivery of nucleic acid molecules of the invention to the CNS is provided by a variety of different strategies. Traditional approaches to CNS delivery that can be used include, but are not limited to, intrathecal and intracerebroventricular administration, implantation of catheters and pumps, direct injection or perfusion at the site of injury or lesion, injection into the brain arterial system, or by chemical or osmotic opening of the blood-brain barrier. Other approaches can include the use of various transport and carrier systems, for example though the use of conjugates and biodegradable polymers. Furthermore, gene therapy approaches, for example as described in Kaplitt et al., U.S. Pat. No. 6,180,613 and Davidson, WO 04/013280, can be used to express nucleic acid molecules in the CNS.

[0615] In one embodiment, the invention features the use of methods to deliver the nucleic acid molecules of the instant invention to hematopoietic cells, including monocytes and lymphocytes. These methods are described in detail by Hartmann et al., 1998, J. Phamacol. Exp. Ther., 285(2), 920-928; Kronenwett et al., 1998, Blood, 91(3), 852-862; Filion and Phillips, 1997, Biochim. Biophys. Acta., 1329(2), 345-356; Ma and Wei, 1996, Leuk. Res., 20(11/12), 925-930; and Bongartz et al., 1994, Nucleic Acids Research, 22(22), 4681-8. Such methods, as described above, include the use of free oligonucleotide, cationic lipid formulations, liposome formulations including pH sensitive liposomes and immunoliposomes, and bioconjugates including oligonucleotides conjugated to fusogenic peptides, for the transfection of hematopoietic cells with oligonucleotides.

[0616] In one embodiment, siNA compounds and compositions of the invention are administered either systemically or locally about every 1-50 weeks (e.g., about every 1, 2, 3, 4, 5, 6, 7, 8, 9, 10, 11, 12, 13, 14, 15, 16, 17, 18, 19, 20, 21, 22, 23, 24, 25, 26, 27, 28, 29, 30, 31, 32, 33, 34, 35, 36, 37, 38, 39, 40, 41, 42, 43, 44, 45, 46, 47, 48, 49, or 50 weeks), alone or in combination with other compounds and/or therapies herein. In one embodiment, siNA compounds and compositions of the invention are administered systemically (e.g., via intravenous, subcutaneous, intramuscular, infusion, pump, implant etc.) about every 1-50 weeks (e.g., about every 1, 2, 3, 4, 5, 6, 7, 8, 9, 10, 11, 12, 13, 14, 15, 16, 17, 18, 19, 20, 21, 22, 23, 24, 25, 26, 27, 28, 29, 30, 31, 32, 33, 34, 35, 36, 37, 38, 39, 40, 41, 42, 43, 44, 45, 46, 47, 48, 49, or 50 weeks), alone or in combination with other compounds and/or therapies described herein and/or otherwise known in the art.

[0617] In one embodiment, delivery systems of the invention include, for example, aqueous and nonaqueous gels, creams, multiple emulsions, microemulsions, liposomes, ointments, aqueous and nonaqueous solutions, lotions, aerosols, hydrocarbon bases and powders, and can contain excipients such as solubilizers, permeation enhancers (e.g., fatty acids, fatty acid esters, fatty alcohols and amino acids), and hydrophilic polymers (e.g., polycarbophil and polyvinylpyrolidone). In one embodiment, the pharmaceutically acceptable carrier is a liposome or a transdermal enhancer. Examples of liposomes which can be used in this invention include the following: (1) CellFectin, 1:1.5 (M/M) liposome formulation of the cationic lipid N,NI,NII,NIII-tetramethyl-N,NI,NII,NIII-tetrapalmit-y-spermine and dioleoyl phosphatidylethanolamine (DOPE) (GIBCO BRL); (2) Cytofectin GSV, 2:1 (M/M) liposome formulation of a cationic lipid and DOPE (Glen Research); (3) DOTAP (N-[1-(2,3-dioleoyloxy)-N,N,N-tri-methyl-ammoniummethylsulfate) (Boehringer Manheim); and (4) Lipofectamine, 3:1 (M/M) liposome formulation of the polycationic lipid DOSPA and the neutral lipid DOPE (GIBCO BRL).

[0618] In one embodiment, delivery systems of the invention include patches, tablets, suppositories, pessaries, gels and creams, and can contain excipients such as solubilizers and enhancers (e.g., propylene glycol, bile salts and amino acids), and other vehicles (e.g., polyethylene glycol, fatty acid esters and derivatives, and hydrophilic polymers such as hydroxypropylmethylcellulose and hyaluronic acid).

[0619] In one embodiment, siNA molecules of the invention are formulated or complexed with polyethylenimine (e.g., linear or branched PEI) and/or polyethylenimine derivatives, including for example grafted PEIs such as galactose PEI, cholesterol PEI, antibody derivatized PEI, and polyethylene glycol PEI (PEG-PEI) derivatives thereof (see for example Ogris et al., 2001, AAPA PharmSci, 3, 1-11; Furgeson et al., 2003, Bioconjugate Chem., 14, 840-847; Kunath et al., 2002, Pharmaceutical Research, 19, 810-817; Choi et al., 2001, Bull. Korean Chem. Soc., 22, 46-52; Bettinger et al., 1999, Bioconjugate Chem., 10, 558-561; Peterson et al., 2002, Bioconjugate Chem., 13, 845-854; Erbacher et al., 1999, Journal of gene Medicine Preprint, 1, 1-18; Godbey et al., 1999., PNAS USA, 96, 5177-5181; Godbey et al., 1999, Journal of Controlled Release, 60, 149-160; Diebold et al., 1999, Journal of Biological Chemistry, 274, 19087-19094; Thomas and Klibanov, 2002, PNAS USA, 99, 14640-14645; and Sagara, U.S. Pat. No. 6,586,524, incorporated by reference herein.

[0620] In one embodiment, a siNA molecule of the invention comprises a bioconjugate, for example a nucleic acid conjugate as described in Vargeese et al., U.S. Ser. No. 10/427,160, filed Apr. 30, 2003; U.S. Pat. No. 6,528,631; U.S. Pat. No. 6,335,434; U.S. Pat. No. 6,235,886; U.S. Pat. No. 6,153,737; U.S. Pat. No. 5,214,136; U.S. Pat. No. 5,138,045, all incorporated by reference herein.

[0621] Thus, the invention features a pharmaceutical composition comprising one or more nucleic acid(s) of the invention in an acceptable carrier, such as a stabilizer, buffer, and the like. The polynucleotides of the invention can be administered (e.g., RNA, DNA or protein) and introduced to a subject by any standard means, with or without stabilizers, buffers, and the like, to form a pharmaceutical composition. When it is desired to use a liposome delivery mechanism, standard protocols for formation of liposomes can be followed. The compositions of the present invention can also be formulated and used as creams, gels, sprays, oils and other suitable compositions for topical, dermal, or transdermal administration as is known in the art.

[0622] The present invention also includes pharmaceutically acceptable formulations of the compounds described. These formulations include salts of the above compounds, e.g., acid addition salts, for example, salts of hydrochloric, hydrobromic, acetic acid, and benzene sulfonic acid.

[0623] A pharmacological composition or formulation refers to a composition or formulation in a form suitable for administration, e.g., systemic or local administration, into a cell or subject, including for example a human. Suitable forms, in part, depend upon the use or the route of entry, for example oral, transdermal, or by injection. Such forms should not prevent the composition or formulation from reaching a target cell (i.e., a cell to which the negatively charged nucleic acid is desirable for delivery). For example, pharmacological compositions injected into the blood stream should be soluble. Other factors are known in the art, and include considerations such as toxicity and forms that prevent the composition or formulation from exerting its effect.

[0624] In one embodiment, siNA molecules of the invention are administered to a subject by systemic administration in a pharmaceutically acceptable composition or formulation. By “systemic administration” is meant in vivo systemic absorption or accumulation of drugs in the blood stream followed by distribution throughout the entire body. Administration routes that lead to systemic absorption include, without limitation: intravenous, subcutaneous, portal vein, intraperitoneal, inhalation, oral, intrapulmonary and intramuscular. Each of these administration routes exposes the siNA molecules of the invention to an accessible diseased tissue (e.g., lung). The rate of entry of a drug into the circulation has been shown to be a function of molecular weight or size. The use of a liposome or other drug carrier comprising the compounds of the instant invention can potentially localize the drug, for example, in certain tissue types, such as the tissues of the reticular endothelial system (RES). A liposome formulation that can facilitate the association of drug with the surface of cells, such as, lymphocytes and macrophages is also useful. This approach can provide enhanced delivery of the drug to target cells by taking advantage of the specificity of macrophage and lymphocyte immune recognition of abnormal cells.

[0625] By “pharmaceutically acceptable formulation” or “pharmaceutically acceptable composition” is meant, a composition or formulation that allows for the effective distribution of the nucleic acid molecules of the instant invention in the physical location most suitable for their desired activity. Non-limiting examples of agents suitable for formulation with the nucleic acid molecules of the instant invention include: P-glycoprotein inhibitors (such as Pluronic P85); biodegradable polymers, such as poly (DL-lactide-coglycolide) microspheres for sustained release delivery (Emerich, D F et al, 1999, Cell Transplant, 8, 47-58); and loaded nanoparticles, such as those made of polybutylcyanoacrylate. Other non-limiting examples of delivery strategies for the nucleic acid molecules of the instant invention include material described in Boado et al., 1998, J. Pharm. Sci., 87, 1308-1315; Tyler et al., 1999, FEBS Lett., 421, 280-284; Pardridge et al., 1995, PNAS USA., 92, 5592-5596; Boado, 1995, Adv. Drug Delivery Rev., 15, 73-107; Aldrian-Herrada et al., 1998, Nucleic Acids Res., 26, 4910-4916; and Tyler et al., 1999, PNAS USA., 96, 7053-7058.

[0626] The invention also features the use of a composition comprising surface-modified liposomes containing poly (ethylene glycol) lipids (PEG-modified, or long-circulating liposomes or stealth liposomes) and nucleic acid molecules of the invention. These formulations offer a method for increasing the accumulation of drugs (e.g., siNA) in target tissues. This class of drug carriers resists opsonization and elimination by the mononuclear phagocytic system (MPS or RES), thereby enabling longer blood circulation times and enhanced tissue exposure for the encapsulated drug (Lasic et al. Chem. Rev. 1995, 95, 2601-2627; Ishiwata et al., Chem. Pharm. Bull. 1995, 43, 1005-1011). Such liposomes have been shown to accumulate selectively in tumors, presumably by extravasation and capture in the neovascularized target tissues (Lasic et al., Science 1995, 267, 1275-1276; Oku et al., 1995, Biochim. Biophys. Acta, 1238, 86-90). The long-circulating liposomes enhance the pharmacokinetics and pharmacodynamics of DNA and RNA, particularly compared to conventional cationic liposomes which are known to accumulate in tissues of the MPS (Liu et al., J. Biol. Chem. 1995, 42, 24864-24870; Choi et al., International PCT Publication No. WO 96/10391; Ansell et al., International PCT Publication No. WO 96/10390; Holland et al., International PCT Publication No. WO 96/10392). Long-circulating liposomes are also likely to protect drugs from nuclease degradation to a greater extent compared to cationic liposomes, based on their ability to avoid accumulation in metabolically aggressive MPS tissues such as the liver and spleen.

[0627] In one embodiment, a liposomal formulation of the invention comprises a double stranded nucleic acid molecule of the invention (e.g, siNA) formulated or complexed with compounds and compositions described in U.S. Pat. Nos. 6,858,224; 6,534,484; 6,287,591; 6,835,395; 6,586,410; 6,858,225; 6,815,432; U.S. Pat. Nos. 6,586,001; 6,120,798; U.S. Pat. No. 6,977,223; U.S. Pat. Nos. 6,998,115; 5,981,501; 5,976,567; 5,705,385; US 2006/0019912; US 2006/0019258; US 2006/0008909; US 2005/0255153; US 2005/0079212; US 2005/0008689; US 2003/0077829, US 2005/0064595, US 2005/0175682, US 2005/0118253; US 2004/0071654; US 2005/0244504; US 2005/0265961 and US 2003/0077829, all of which are incorporated by reference herein in their entirety.

[0628] The present invention also includes compositions prepared for storage or administration that include a pharmaceutically effective amount of the desired compounds in a pharmaceutically acceptable carrier or diluent. Acceptable carriers or diluents for therapeutic use are well known in the pharmaceutical art, and are described, for example, in Remington's Pharmaceutical Sciences, Mack Publishing Co. (A. R. Gennaro edit. 1985), hereby incorporated by reference herein. For example, preservatives, stabilizers, dyes and flavoring agents can be provided. These include sodium benzoate, sorbic acid and esters of p-hydroxybenzoic acid. In addition, antioxidants and suspending agents can be used.

[0629] A pharmaceutically effective dose is that dose required to prevent, inhibit the occurrence, or treat (alleviate a symptom to some extent, preferably all of the symptoms) of a disease state. The pharmaceutically effective dose depends on the type of disease, the composition used, the route of administration, the type of mammal being treated, the physical characteristics of the specific mammal under consideration, concurrent medication, and other factors that those skilled in the medical arts will recognize. generally, an amount between 0.1 mg/kg and 100 mg/kg body weight/day of active ingredients is administered dependent upon potency of the negatively charged polymer.

[0630] The nucleic acid molecules of the invention and formulations thereof can be administered orally, topically, parenterally, by inhalation or spray, or rectally in dosage unit formulations containing conventional non-toxic pharmaceutically acceptable carriers, adjuvants and/or vehicles. The term parenteral as used herein includes percutaneous, subcutaneous, intravascular (e.g., intravenous), intramuscular, or intrathecal injection or infusion techniques and the like. In addition, there is provided a pharmaceutical formulation comprising a nucleic acid molecule of the invention and a pharmaceutically acceptable carrier. One or more nucleic acid molecules of the invention can be present in association with one or more non-toxic pharmaceutically acceptable carriers and/or diluents and/or adjuvants, and if desired other active ingredients. The pharmaceutical compositions containing nucleic acid molecules of the invention can be in a form suitable for oral use, for example, as tablets, troches, lozenges, aqueous or oily suspensions, dispersible powders or granules, emulsion, hard or soft capsules, or syrups or elixirs.

[0631] Compositions intended for oral use can be prepared according to any method known to the art for the manufacture of pharmaceutical compositions and such compositions can contain one or more such sweetening agents, flavoring agents, coloring agents or preservative agents in order to provide pharmaceutically elegant and palatable preparations. Tablets contain the active ingredient in admixture with non-toxic pharmaceutically acceptable excipients that are suitable for the manufacture of tablets. These excipients can be, for example, inert diluents; such as calcium carbonate, sodium carbonate, lactose, calcium phosphate or sodium phosphate; granulating and disintegrating agents, for example, corn starch, or alginic acid; binding agents, for example starch, gelatin or acacia; and lubricating agents, for example magnesium stearate, stearic acid or talc. The tablets can be uncoated or they can be coated by known techniques. In some cases such coatings can be prepared by known techniques to delay disintegration and absorption in the gastrointestinal tract and thereby provide a sustained action over a longer period. For example, a time delay material such as glyceryl monosterate or glyceryl distearate can be employed.

[0632] Formulations for oral use can also be presented as hard gelatin capsules wherein the active ingredient is mixed with an inert solid diluent, for example, calcium carbonate, calcium phosphate or kaolin, or as soft gelatin capsules wherein the active ingredient is mixed with water or an oil medium, for example peanut oil, liquid paraffin or olive oil.

[0633] Aqueous suspensions contain the active materials in a mixture with excipients suitable for the manufacture of aqueous suspensions. Such excipients are suspending agents, for example sodium carboxymethylcellulose, methylcellulose, hydropropyl-methylcellulose, sodium alginate, polyvinylpyrrolidone, gum tragacanth and gum acacia; dispersing or wetting agents can be a naturally-occurring phosphatide, for example, lecithin, or condensation products of an alkylene oxide with fatty acids, for example polyoxyethylene stearate, or condensation products of ethylene oxide with long chain aliphatic alcohols, for example heptadecaethyleneoxycetanol, or condensation products of ethylene oxide with partial esters derived from fatty acids and a hexitol such as polyoxyethylene sorbitol monooleate, or condensation products of ethylene oxide with partial esters derived from fatty acids and hexitol anhydrides, for example polyethylene sorbitan monooleate. The aqueous suspensions can also contain one or more preservatives, for example ethyl, or n-propyl p-hydroxybenzoate, one or more coloring agents, one or more flavoring agents, and one or more sweetening agents, such as sucrose or saccharin.

[0634] Oily suspensions can be formulated by suspending the active ingredients in a vegetable oil, for example arachis oil, olive oil, sesame oil or coconut oil, or in a mineral oil such as liquid paraffin. The oily suspensions can contain a thickening agent, for example beeswax, hard paraffin or cetyl alcohol. Sweetening agents and flavoring agents can be added to provide palatable oral preparations. These compositions can be preserved by the addition of an anti-oxidant such as ascorbic acid

[0635] Dispersible powders and granules suitable for preparation of an aqueous suspension by the addition of water provide the active ingredient in admixture with a dispersing or wetting agent, suspending agent and one or more preservatives. Suitable dispersing or wetting agents or suspending agents are exemplified by those already mentioned above. Additional excipients, for example sweetening, flavoring and coloring agents, can also be present.

[0636] Pharmaceutical compositions of the invention can also be in the form of oil-in-water emulsions. The oily phase can be a vegetable oil or a mineral oil or mixtures of these. Suitable emulsifying agents can be naturally-occurring gums, for example gum acacia or gum tragacanth, naturally-occurring phosphatides, for example soy bean, lecithin, and esters or partial esters derived from fatty acids and hexitol, anhydrides, for example sorbitan monooleate, and condensation products of the said partial esters with ethylene oxide, for example polyoxyethylene sorbitan monooleate. The emulsions can also contain sweetening and flavoring agents.

[0637] Syrups and elixirs can be formulated with sweetening agents, for example glycerol, propylene glycol, sorbitol, glucose or sucrose. Such formulations can also contain a demulcent, a preservative and flavoring and coloring agents. The pharmaceutical compositions can be in the form of a sterile injectable aqueous or oleaginous suspension. This suspension can be formulated according to the known art using those suitable dispersing or wetting agents and suspending agents that have been mentioned above. The sterile injectable preparation can also be a sterile injectable solution or suspension in a non-toxic parentally acceptable diluent or solvent, for example as a solution in 1,3-butanediol. Among the acceptable vehicles and solvents that can be employed are water, Ringer's solution and isotonic sodium chloride solution. In addition, sterile, fixed oils are conventionally employed as a solvent or suspending medium. For this purpose, any bland fixed oil can be employed including synthetic mono- or diglycerides. In addition, fatty acids such as oleic acid find use in the preparation of injectables.

[0638] The nucleic acid molecules of the invention can also be administered in the form of suppositories, e.g., for rectal administration of the drug. These compositions can be prepared by mixing the drug with a suitable non-irritating excipient that is solid at ordinary temperatures but liquid at the rectal temperature and will therefore melt in the rectum to release the drug. Such materials include cocoa butter and polyethylene glycols.

[0639] Nucleic acid molecules of the invention can be administered parenterally in a sterile medium. The drug, depending on the vehicle and concentration used, can either be suspended or dissolved in the vehicle. Advantageously, adjuvants such as local anesthetics, preservatives and buffering agents can be dissolved in the vehicle.

[0640] Dosage levels of the order of from about 0.1 mg to about 140 mg per kilogram of body weight per day are useful in the treatment of the above-indicated conditions (about 0.5 mg to about 7 g per subject per day). The amount of active ingredient that can be combined with the carrier materials to produce a single dosage form varies depending upon the host treated and the particular mode of administration. Dosage unit forms generally contain between from about 1 mg to about 500 mg of an active ingredient.

[0641] It is understood that the specific dose level for any particular subject depends upon a variety of factors including the activity of the specific compound employed, the age, body weight, general health, sex, diet, time of administration, route of administration, and rate of excretion, drug combination and the severity of the particular disease undergoing therapy.

[0642] For administration to non-human animals, the composition can also be added to the animal feed or drinking water. It can be convenient to formulate the animal feed and drinking water compositions so that the animal takes in a therapeutically appropriate quantity of the composition along with its diet. It can also be convenient to present the composition as a premix for addition to the feed or drinking water.

[0643] The nucleic acid molecules of the present invention can also be administered to a subject in combination with other therapeutic compounds to increase the overall therapeutic effect. The use of multiple compounds to treat an indication can increase the beneficial effects while reducing the presence of side effects.

[0644] In one embodiment, the invention comprises compositions suitable for administering nucleic acid molecules of the invention to specific cell types. For example, the asialoglycoprotein receptor (ASGPr) (Wu and Wu, 1987, J. Biol. Chem. 262, 4429-4432) is unique to hepatocytes and binds branched galactose-terminal glycoproteins, such as asialoorosomucoid (ASOR). In another example, the folate receptor is overexpressed in many cancer cells. Binding of such glycoproteins, synthetic glycoconjugates, or folates to the receptor takes place with an affinity that strongly depends on the degree of branching of the oligosaccharide chain, for example, triatennary structures are bound with greater affinity than biatenarry or monoatennary chains (Baenziger and Fiete, 1980, Cell, 22, 611-620; Connolly et al., 1982, J. Biol. Chem., 257, 939-945). Lee and Lee, 1987, Glycoconjugate J., 4, 317-328, obtained this high specificity through the use of N-acetyl-D-galactosamine as the carbohydrate moiety, which has higher affinity for the receptor, compared to galactose. This “clustering effect” has also been described for the binding and uptake of mannosyl-terminating glycoproteins or glycoconjugates (Ponpipom et al., 1981, J. Med. Chem., 24, 1388-1395). The use of galactose, galactosamine, or folate based conjugates to transport exogenous compounds across cell membranes can provide a targeted delivery approach to, for example, the treatment of liver disease, cancers of the liver, or other cancers. The use of bioconjugates can also provide a reduction in the required dose of therapeutic compounds required for treatment. Furthermore, therapeutic bioavailability, pharmacodynamics, and pharmacokinetic parameters can be modulated through the use of nucleic acid bioconjugates of the invention. Non-limiting examples of such bioconjugates are described in Vargeese et al., U.S. Ser. No. 10/201,394, filed Aug. 13, 2001; and Matulic-Adamic et al., U.S. Ser. No. 60/362,016, filed Mar. 6, 2002.

[0645] Alternatively, certain siNA molecules of the instant invention can be expressed within cells from eukaryotic promoters (e.g., Izant and Weintraub, 1985, Science, 229, 345; McGarry and Lindquist, 1986, Proc. Natl. Acad. Sci., USA 83, 399; Scanlon et al., 1991, Proc. Natl. Acad. Sci. USA, 88, 10591-5; Kashani-Sabet et al., 1992, Antisense Res. Dev., 2, 3-15; Dropulic et al., 1992, J. Virol., 66, 1432-41; Weerasinghe et al., 1991, J. Virol., 65, 5531-4; Ojwang et al., 1992, Proc. Natl. Acad. Sci. USA, 89, 10802-6; Chen et al., 1992, Nucleic Acids Res., 20, 4581-9; Sarver et al., 1990 Science, 247, 1222-1225; Thompson et al., 1995, Nucleic Acids Res., 23, 2259; Good et al., 1997, gene Therapy, 4, 45. Those skilled in the art realize that any nucleic acid can be expressed in eukaryotic cells from the appropriate DNA/RNA vector. The activity of such nucleic acids can be augmented by their release from the primary transcript by a enzymatic nucleic acid (Draper et al., PCT WO 93/23569, and Sullivan et al., PCT WO 94/02595; Ohkawa et al., 1992, Nucleic Acids Symp. Ser., 27, 15-6; Taira et al., 1991, Nucleic Acids Res., 19, 5125-30; Ventura et al., 1993, Nucleic Acids Res., 21, 3249-55; Chowrira et al., 1994, J. Biol. Chem., 269, 25856.

[0646] In another aspect of the invention, RNA molecules of the present invention can be expressed from transcription units (see for example Couture et al., 1996, TIG., 12, 510) inserted into DNA or RNA vectors. The recombinant vectors can be DNA plasmids or viral vectors. siNA expressing viral vectors can be constructed based on, but not limited to, adeno-associated virus, retrovirus, adenovirus, or alphavirus. In another embodiment, pol III based constructs are used to express nucleic acid molecules of the invention (see for example Thompson, U.S. Pats. Nos. 5,902,880 and 6,146,886). The recombinant vectors capable of expressing the siNA molecules can be delivered as described above, and persist in target cells. Alternatively, viral vectors can be used that provide for transient expression of nucleic acid molecules. Such vectors can be repeatedly administered as necessary. Once expressed, the siNA molecule interacts with the target mRNA and generates an RNAi response. Delivery of siNA molecule expressing vectors can be systemic, such as by intravenous or intra-muscular administration, by administration to target cells ex-planted from a subject followed by reintroduction into the subject, or by any other means that would allow for introduction into the desired target cell (for a review see Couture et al, 1996, TIG., 12, 510).

[0647] In one aspect the invention features an expression vector comprising a nucleic acid sequence encoding at least one siNA molecule of the instant invention. The expression vector can encode one or both strands of a siNA duplex, or a single self-complementary strand that self hybridizes into a siNA duplex. The nucleic acid sequences encoding the siNA molecules of the instant invention can be operably linked in a manner that allows expression of the siNA molecule (see for example Paul et al., 2002, Nature Biotechnology, 19, 505; Miyagishi and Taira, 2002, Nature Biotechnology, 19, 497; Lee et al., 2002, Nature Biotechnology, 19, 500; and Novina et al., 2002, Nature Medicine, advance online publication doi: 10.1038/nm725).

[0648] In another aspect, the invention features an expression vector comprising: a) a transcription initiation region (e.g., eukaryotic pol I, II or III initiation region); b) a transcription termination region (e.g., eukaryotic pol I, II or III termination region); and c) a nucleic acid sequence encoding at least one of the siNA molecules of the instant invention, wherein said sequence is operably linked to said initiation region and said termination region in a manner that allows expression and/or delivery of the siNA molecule. The vector can optionally include an open reading frame (ORF) for a protein operably linked on the 5′ side or the 3′-side of the sequence encoding the siNA of the invention; and/or an intron (intervening sequences).

[0649] Transcription of the siNA molecule sequences can be driven from a promoter for eukaryotic RNA polymerase I (pol I), RNA polymerase II (pol II), or RNA polymerase III (pol III). Transcripts from pol II or pol III promoters are expressed at high levels in all cells; the levels of a given pol II promoter in a given cell type depends on the nature of the gene regulatory sequences (enhancers, silencers, etc.) present nearby. Prokaryotic RNA polymerase promoters are also used, providing that the prokaryotic RNA polymerase enzyme is expressed in the appropriate cells (Elroy-Stein and Moss, 1990, Proc. Natl. Acad. Sci. US A, 87, 6743-7; Gao and Huang 1993, Nucleic Acids Res., 21, 2867-72; Lieber et al., 1993, Methods Enzymol., 217, 47-66; Zhou et al., 1990, Mol. Cell. Biol., 10, 4529-37). Several investigators have demonstrated that nucleic acid molecules expressed from such promoters can function in mammalian cells (e.g. Kashani-Sabet et al., 1992, Antisense Res. Dev., 2, 3-15; Ojwang et al., 1992, Proc. Natl. Acad. Sci. USA, 89, 10802-6; Chen et al., 1992, Nucleic Acids Res., 20, 4581-9; Yu et al., 1993, Proc. Natl. Acad. Sci. USA, 90, 6340-4; L'Huillier et al., 1992, EMBO J., 11, 4411-8; Lisziewicz et al., 1993, Proc. Natl. Acad. Sci. U.S.A., 90, 8000-4; Thompson et al., 1995, Nucleic Acids Res., 23, 2259; Sullenger & Cech, 1993, Science, 262, 1566). More specifically, transcription units such as the ones derived from genes encoding U6 small nuclear (snRNA), transfer RNA (tRNA) and adenovirus VA RNA are useful in generating high concentrations of desired RNA molecules such as siNA in cells (Thompson et al., supra; Couture and Stinchcomb, 1996, supra; Noonberg et al., 1994, Nucleic Acid Res., 22, 2830; Noonberg et al., U.S. Pat. No. 5,624,803; Good et al., 1997, gene Ther., 4, 45; Beigelman et al., International PCT Publication No. WO 96/18736. The above siNA transcription units can be incorporated into a variety of vectors for introduction into mammalian cells, including but not restricted to, plasmid DNA vectors, viral DNA vectors (such as adenovirus or adeno-associated virus vectors), or viral RNA vectors (such as retroviral or alphavirus vectors) (for a review see Couture and Stinchcomb, 1996, supra).

[0650] In another aspect the invention features an expression vector comprising a nucleic acid sequence encoding at least one of the siNA molecules of the invention in a manner that allows expression of that siNA molecule. The expression vector comprises in one embodiment; a) a transcription initiation region; b) a transcription termination region; and c) a nucleic acid sequence encoding at least one strand of the siNA molecule, wherein the sequence is operably linked to the initiation region and the termination region in a manner that allows expression and/or delivery of the siNA molecule.

[0651] In another embodiment the expression vector comprises: a) a transcription initiation region; b) a transcription termination region; c) an open reading frame; and d) a nucleic acid sequence encoding at least one strand of a siNA molecule, wherein the sequence is operably linked to the 3′-end of the open reading frame and wherein the sequence is operably linked to the initiation region, the open reading frame and the termination region in a manner that allows expression and/or delivery of the siNA molecule. In yet another embodiment, the expression vector comprises: a) a transcription initiation region; b) a transcription termination region; c) an intron; and d) a nucleic acid sequence encoding at least one siNA molecule, wherein the sequence is operably linked to the initiation region, the intron and the termination region in a manner which allows expression and/or delivery of the nucleic acid molecule.

[0652] In another embodiment, the expression vector comprises: a) a transcription initiation region; b) a transcription termination region; c) an intron; d) an open reading frame; and e) a nucleic acid sequence encoding at least one strand of a siNA molecule, wherein the sequence is operably linked to the 3′-end of the open reading frame and wherein the sequence is operably linked to the initiation region, the intron, the open reading frame and the termination region in a manner which allows expression and/or delivery of the siNA molecule.

### HCV Biology and Biochemistry

[0653] In 1989, the Hepatitis C Virus (HCV) was determined to be an RNA virus and was identified as the causative agent of most non-A non-B viral Hepatitis (Choo et al., 1989, Science, 244, 359-362). Unlike retroviruses such as HIV, HCV does not go though a DNA replication phase and no integrated forms of the viral genome into the host chromosome have been detected (Houghton et al., 1991, Hepatology, 14, 381-388). Rather, replication of the coding (plus) strand is mediated by the production of a replicative (minus) strand leading to the generation of several copies of plus strand HCV RNA. The genome consists of a single, large, open-reading frame that is translated into a polyprotein (Kato et al., 1991, FEBS Letters, 280: 325-328). This polyprotein subsequently undergoes post-translational cleavage, producing several viral proteins (Leinbach et al., 1994, Virology, 204:163-169).

[0654] Examination of the 9.5-kilobase genome of HCV has demonstrated that the viral nucleic acid can mutate at a high rate (Smith et al., 1997 Mol. Evol. 45, 238-246). This rate of mutation has led to the evolution of several distinct genotypes of HCV that share approximately 70% sequence identity (Simmonds et al., 1994, J. Gen. Virol. 75, 1053-1061). It is important to note that these sequences are evolutionarily quite distant. For example, the genetic identity between humans and primates such as the chimpanzee is approximately 98%. In addition, it has been demonstrated that an HCV infection in an individual patient is composed of several distinct and evolving quasispecies that have 98% identity at the RNA level. Thus, the HCV genome is hypervariable and continuously changing. Although the HCV genome is hypervariable, there are 3 regions of the genome that are highly conserved. These conserved sequences occur in the 5′ and 3′ non-coding regions as well as the 5′-end of the core protein coding region and are thought to be vital for HCV RNA replication as well as translation of the HCV polyprotein. Thus, therapeutic agents that target these conserved HCV genomic regions may have a significant impact over a wide range of HCV genotypes. Moreover, it is unlikely that drug resistance will occur with enzymatic nucleic acids specific to conserved regions of the HCV genome. In contrast, therapeutic modalities that target inhibition of enzymes such as the viral proteases or helicase are likely to result in the selection for drug resistant strains since the RNA for these viral encoded enzymes is located in the hypervariable portion of the HCV genome.

[0655] After initial exposure to HCV, a patient experiences a transient rise in liver enzymes, which indicates that inflammatory processes are occurring (Alter et al., IN: Seeff L B, Lewis J H, eds. Current Perspectives in Hepatology. New York: Plenum Medical Book Co; 1989:83-89). This elevation in liver enzymes occurs at least 4 weeks after the initial exposure and may last for up to two months (Farci et al., 1991, New England Journal of Medicine. 325, 98-104). Prior to the rise in liver enzymes, it is possible to detect HCV RNA in the patient's serum using RT-PCR analysis (Takahashi et al., 1993, American Journal of Gastroenterology. 88, 240-243). This stage of the disease is called the acute stage and usually goes undetected since 75% of patients with acute viral hepatitis from HCV infection are asymptomatic. The remaining 25% of these patients develop jaundice or other symptoms of hepatitis.

[0656] Although acute HCV infection is a benign disease, as many as 80% of acute HCV patients progress to chronic liver disease as evidenced by persistent elevation of serum alanine aminotransferase (ALT) levels and by continual presence of circulating HCV RNA (Sherlock, 1992, Lancet, 339, 802). The natural progression of chronic HCV infection over a 10 to 20 year period leads to cirrhosis in 20 to 50% of patients (Davis et al., 1993, Infectious Agents and Disease, 2, 150, 154) and progression of HCV infection to hepatocellular carcinoma has been well documented (Liang et al., 1993, Hepatology. 18, 1326-1333; Tong et al., 1994, Western Journal of Medicine, 160, 133-138). There have been no studies that have determined sub-populations that are most likely to progress to cirrhosis and/or hepatocellular carcinoma, thus all patients have equal risk of progression.

[0657] It is important to note that the survival for patients diagnosed with hepatocellular carcinoma is only 0.9 to 12.8 months from initial diagnosis (Takahashi et al., 1993, American Journal of Gastroenterology. 88, 240-243). Treatment of hepatocellular carcinoma with chemotherapeutic agents has not proven effective and only 10% of patients will benefit from surgery due to extensive tumor invasion of the liver (Trinchet et al., 1994, Presse Medicine. 23, 831-833). Given the aggressive nature of primary hepatocellular carcinoma, the only viable treatment alternative to surgery is liver transplantation (Pichlmayr et al., 1994, Hepatology. 20, 33S-40S).

[0658] Upon progression to cirrhosis, patients with chronic HCV infection present with clinical features, which are common to clinical cirrhosis regardless of the initial cause (D'Amico et al., 1986, Digestive Diseases and Sciences. 31, 468-475). These clinical features may include: bleeding esophageal varices, ascites, jaundice, and encephalopathy (Zakim D, Boyer T D. Hepatology a textbook of liver disease. Second Edition Volume 1. 1990 W.B. Saunders Company. Philadelphia). In the early stages of cirrhosis, patients are classified as compensated, the stage at which the patient's liver is still able to detoxify metabolites in the blood-stream although liver tissue damage has occurred. In addition, most patients with compensated liver disease are asymptomatic and the minority with symptoms report only minor symptoms, such as dyspepsia and weakness. In the later stages of cirrhosis, patients are classified as decompensated, the stage at which the ability of the liver to detoxify metabolites in the bloodstream is diminished. It is at the decompensated stage that the clinical features described above present.

[0659] In 1986, D'Amico et al. described the clinical manifestations and survival rates in 1155 patients with both alcoholic and viral associated cirrhosis (D'Amico supra). Of the 1155 patients, 435 (37%) had compensated disease although 70% were asymptomatic at the beginning of the study. The remaining 720 patients (63%) had decompensated liver disease with 78% presenting with a history of ascites, 31% with jaundice, 17% had bleeding and 16% had encephalopathy. Hepatocellular carcinoma was observed in six (0.5%) patients with compensated disease and in 30 (2.6%) patients with decompensated disease.

[0660] Over the course of six years, the patients with compensated cirrhosis developed clinical features of decompensated disease at a rate of 10% per year. In most cases, ascites was the first presentation of decompensation. In addition, hepatocellular carcinoma developed in 59 patients who initially presented with compensated disease by the end of the six-year study.

[0661] With respect to survival, the D'Amico study indicated that the five-year survival rate for all patients in the study was only 40%. The six-year survival rate for the patients who initially had compensated cirrhosis was 54% while the six-year survival rate for patients who initially presented with decompensated disease was only 21%. There were no significant differences in the survival rates between the patients who had alcoholic cirrhosis and the patients with viral related cirrhosis. The major causes of death for the patients in the D'Amico study were liver failure in 49%; hepatocellular carcinoma in 22%; and bleeding in 13% (D'Amico supra).

[0662] Chronic Hepatitis C is a slowly progressing inflammatory disease of the liver, mediated by a virus (HCV) that can lead to cirrhosis, liver failure and/or hepatocellular carcinoma over a period of 10 to 20 years. In the US, it is estimated that infection with HCV accounts for 50,000 new cases of acute hepatitis in the United States each year (NIH Consensus Development Conference Statement on Management of Hepatitis C March 1997). The prevalence of HCV in the United States is estimated at 1.8% and the CDC places the number of chronically infected Americans at approximately 4.5 million people. The CDC also estimates that up to 10,000 deaths per year are caused by chronic HCV infection.

[0663] Numerous well controlled clinical trials using interferon (IFN-alpha) in the treatment of chronic HCV infection have demonstrated that treatment three times a week results in lowering of serum ALT values in approximately 50% (40%-70%) of patients by the end of 6 months of therapy (Davis et al., 1989, New England Journal of Medicine, 321, 1501-1506; Marcellin et al., 1991, Hepatology, 13, 393-397; Tong et al., 1997, Hepatology, 26, 747-754; Tong et al., 1997, Hepatology, 26, 1640-1645). However, following cessation of interferon treatment, approximately 50% of the responding patients relapsed, resulting in a “durable” response rate as assessed by normalization of serum ALT concentrations of approximately 20-25%.

[0664] Direct measurement of HCV RNA is possible through use of either the branched-DNA or Reverse Transcriptase Polymerase Chain Reaction (RT-PCR) analysis. In general, RT-PCR methodology is more sensitive and leads to a more accurate assessment of the clinical course (Tong et al., supra). Studies that have examined six months of type 1 interferon therapy using changes in HCV RNA values as a clinical endpoint have demonstrated that up to 35% of patients have a loss of HCV RNA by the end of therapy (Marcellin et al., supra). However, as with the ALT endpoint, about 50% of the patients relapse within six months following cessation of therapy, resulting in a durable virologic response of only 12% (Marcellin et al., supra). Studies that have examined 48 weeks of therapy have demonstrated that the sustained virological response is up to 25% (NIH consensus statement: 1997). Thus, standard of care for treatment of chronic HCV infection with type 1 interferon is now 48 weeks of therapy using changes in HCV RNA concentrations as the primary assessment of efficacy (Hoofnagle et al., 1997, New England Journal of Medicine, 336, 347-356).

[0665] Side effects resulting from treatment with type 1 interferons can be divided into four general categories, which include: (1) Influenza-like symptoms; (2) Neuropsychiatric; (3) Laboratory abnormalities; and (4) Miscellaneous (Dusheiko et al., 1994, Journal of Viral Hepatitis, 1, 3-5). Examples of influenza-like symptoms include fatigue, fever, myalgia, malaise, appetite loss, tachycardia, rigors, headache, and arthralgias. The influenza-like symptoms are usually short-lived and tend to abate after the first four weeks of dosing (Dushieko et al., supra). Neuropsychiatric side effects include irritability, apathy, mood changes, insomnia, cognitive changes, and depression. The most important of these neuropsychiatric side effects is depression and patients who have a history of depression should not be given type 1 interferon. Laboratory abnormalities include reduction in myeloid cells, including granulocytes, platelets and to a lesser extent red blood cells. These changes in blood cell counts rarely lead to any significant clinical sequellae (Dushieko et al., supra). In addition, increases in triglyceride concentrations and elevations in serum alanine and aspartate aminotransferase concentration have been observed. Finally, thyroid abnormalities have been reported. These thyroid abnormalities are usually reversible after cessation of interferon therapy and can be controlled with appropriate medication while on therapy. Miscellaneous side effects include nausea, diarrhea, abdominal and back pain, pruritus, alopecia, and rhinorrhea. In general, most side effects will abate after 4 to 8 weeks of therapy (Dushieko et al., supra).

[0666] The use of small interfering nucleic acid molecules targeting HCV genes and cellular/host gene targets associated with the HIV life cycle therefore provides a class of novel therapeutic agents that can be used in the treatment and diagnosis of HCV infection, liver failure, hepatocellular carcinoma, cirrhosis or any other disease or condition that responds to modulation (e.g., inhibition) of HCV genes in a subject or organism.

### EXAMPLES

[0667] The following are non-limiting examples showing the selection, isolation, synthesis and activity of nucleic acids of the instant invention.

### Example 1

### Tandem Synthesis of siNA Constructs

[0668] Exemplary siNA molecules of the invention are synthesized in tandem using a cleavable linker, for example, a succinyl-based linker. Tandem synthesis as described herein is followed by a one-step purification process that provides RNAi molecules in high yield. This approach is highly amenable to siNA synthesis in support of high throughput RNAi screening, and can be readily adapted to multi-column or multi-well synthesis platforms.

[0669] After completing a tandem synthesis of a siNA oligo and its complement in which the 5′-terminal dimethoxytrityl (5′-O-DMT) group remains intact (trityl on synthesis), the oligonucleotides are deprotected as described above. Following deprotection, the siNA sequence strands are allowed to spontaneously hybridize. This hybridization yields a duplex in which one strand has retained the 5′-O-DMT group while the complementary strand comprises a terminal 5′-hydroxyl. The newly formed duplex behaves as a single molecule during routine solid-phase extraction purification (Trityl-On purification) even though only one molecule has a dimethoxytrityl group. Because the strands form a stable duplex, this dimethoxytrityl group (or an equivalent group, such as other trityl groups or other hydrophobic moieties) is all that is required to purify the pair of oligos, for example, by using a C18 cartridge.

[0670] Standard phosphoramidite synthesis chemistry is used up to the point of introducing a tandem linker, such as an inverted deoxy abasic succinate or glyceryl succinate linker (see FIG. 1) or an equivalent cleavable linker. A non-limiting example of linker coupling conditions that can be used includes a hindered base such as diisopropylethylamine (DIPA) and/or DMAP in the presence of an activator reagent such as Bromotripyrrolidinophosphoniumhexafluororophosphate (PyBrOP). After the linker is coupled, standard synthesis chemistry is utilized to complete synthesis of the second sequence leaving the terminal the 5′-O-DMT intact. Following synthesis, the resulting oligonucleotide is deprotected according to the procedures described herein and quenched with a suitable buffer, for example with 50 mM NaOAc or 1.5M NH₄H₂CO₃.

[0671] Purification of the siNA duplex can be readily accomplished using solid phase extraction, for example, using a Waters C18 SepPak 1 g cartridge conditioned with 1 column volume (CV) of acetonitrile, 2 CV H2O, and 2 CV 50 mM NaOAc. The sample is loaded and then washed with 1 CV H2O or 50 mM NaOAc. Failure sequences are eluted with 1 CV 14% ACN (Aqueous with 50 mM NaOAc and 50 mM NaCl). The column is then washed, for example with 1 CV H2O followed by on-column detritylation, for example by passing 1 CV of 1% aqueous trifluoroacetic acid (TFA) over the column, then adding a second CV of 1% aqueous TFA to the column and allowing to stand for approximately 10 minutes. The remaining TFA solution is removed and the column washed with H2O followed by 1 CV 1M NaCl and additional H2O. The siNA duplex product is then eluted, for example, using 1 CV 20% aqueous CAN.

[0672] FIG. 2 provides an example of MALDI-TOF mass spectrometry analysis of a purified siNA construct in which each peak corresponds to the calculated mass of an individual siNA strand of the siNA duplex. The same purified siNA provides three peaks when analyzed by capillary gel electrophoresis (CGE), one peak presumably corresponding to the duplex siNA, and two peaks presumably corresponding to the separate siNA sequence strands. Ion exchange HPLC analysis of the same siNA contract only shows a single peak. Testing of the purified siNA construct using a luciferase reporter assay described below demonstrated the same RNAi activity compared to siNA constructs generated from separately synthesized oligonucleotide sequence strands.

### Example 2

### Identification of Potential siNA Target Sites in any RNA Sequence

[0673] The sequence of an RNA target of interest, such as a human mRNA transcript (e.g., any of sequences referred to herein by GenBank Accession Number), is screened for target sites, for example by using a computer folding algorithm. In a non-limiting example, the sequence of a gene or RNA gene transcript derived from a database, such as Genbank, is used to generate siNA targets having complementarity to the target. Such sequences can be obtained from a database, or can be determined experimentally as known in the art. Target sites that are known, for example, those target sites determined to be effective target sites based on studies with other nucleic acid molecules, for example ribozymes or antisense, or those targets known to be associated with a disease, trait, or condition such as those sites containing mutations or deletions, can be used to design siNA molecules targeting those sites. Various parameters can be used to determine which sites are the most suitable target sites within the target RNA sequence. These parameters include but are not limited to secondary or tertiary RNA structure, the nucleotide base composition of the target sequence, the degree of homology between various regions of the target sequence, or the relative position of the target sequence within the RNA transcript. Based on these determinations, any number of target sites within the RNA transcript can be chosen to screen siNA molecules for efficacy, for example by using in vitro RNA cleavage assays, cell culture, or animal models. In a non-limiting example, anywhere from 1 to 1000 target sites are chosen within the transcript based on the size of the siNA construct to be used. High throughput screening assays can be developed for screening siNA molecules using methods known in the art, such as with multi-well or multi-plate assays to determine efficient reduction in target gene expression.

### Example 3

### Selection of siNA Molecule Target Sites in a RNA

[0674] The following non-limiting steps can be used to carry out the selection of siNAs targeting a given gene sequence or transcript.

[0675] 1. The target sequence is parsed in silico into a list of all fragments or subsequences of a particular length, for example 23 nucleotide fragments, contained within the target sequence. This step is typically carried out using a custom Perl script, but commercial sequence analysis programs such as Oligo, MacVector, or the GCG Wisconsin Package can be employed as well.

[0676] 2. In some instances the siNAs correspond to more than one target sequence; such would be the case for example in targeting different transcripts of the same gene, targeting different transcripts of more than one gene, or for targeting both the human gene and an animal homolog. In this case, a subsequence list of a particular length is generated for each of the targets, and then the lists are compared to find matching sequences in each list. The subsequences are then ranked according to the number of target sequences that contain the given subsequence; the goal is to find subsequences that are present in most or all of the target sequences. Alternately, the ranking can identify subsequences that are unique to a target sequence, such as a mutant target sequence. Such an approach would enable the use of siNA to target specifically the mutant sequence and not effect the expression of the normal sequence.

[0677] 3. In some instances the siNA subsequences are absent in one or more sequences while present in the desired target sequence; such would be the case if the siNA targets a gene with a paralogous family member that is to remain untargeted. As in case 2 above, a subsequence list of a particular length is generated for each of the targets, and then the lists are compared to find sequences that are present in the target gene but are absent in the untargeted paralog.

[0678] 4. The ranked siNA subsequences can be further analyzed and ranked according to GC content. A preference can be given to sites containing 30-70% GC, with a further preference to sites containing 40-60% GC.

[0679] 5. The ranked siNA subsequences can be further analyzed and ranked according to self-folding and internal hairpins. Weaker internal folds are preferred; strong hairpin structures are to be avoided.

[0680] 6. The ranked siNA subsequences can be further analyzed and ranked according to whether they have runs of GGG or CCC in the sequence. GGG (or even more Gs) in either strand can make oligonucleotide synthesis problematic and can potentially interfere with RNAi activity, so it is avoided whenever better sequences are available. CCC is searched in the target strand because that will place GGG in the antisense strand.

[0681] 7. The ranked siNA subsequences can be further analyzed and ranked according to whether they have the dinucleotide UU (uridine dinucleotide) on the 3′-end of the sequence, and/or AA on the 5′-end of the sequence (to yield 3′ UU on the antisense sequence). These sequences allow one to design siNA molecules with terminal TT thymidine dinucleotides.

[0682] 8. Four or five target sites are chosen from the ranked list of subsequences as described above. For example, in subsequences having 23 nucleotides, the right 21 nucleotides of each chosen 23-mer subsequence are then designed and synthesized for the upper (sense) strand of the siNA duplex, while the reverse complement of the left 21 nucleotides of each chosen 23-mer subsequence are then designed and synthesized for the lower (antisense) strand of the siNA duplex (see Table II). If terminal TT residues are desired for the sequence (as described in paragraph 7), then the two 3′ terminal nucleotides of both the sense and antisense strands are replaced by TT prior to synthesizing the oligos.

[0683] 9. The siNA molecules are screened in an in vitro, cell culture or animal model system to identify the most active siNA molecule or the most preferred target site within the target RNA sequence.

[0684] 10. Other design considerations can be used when selecting target nucleic acid sequences, see, for example, Reynolds et al., 2004, Nature Biotechnology Advanced Online Publication, 1 Feb. 2004, doi:10.1038/nbt936 and Ui-Tei et al., 2004, Nucleic Acids Research, 32, doi:10.1093/nar/gkh247.

[0685] In an alternate approach, a pool of siNA constructs specific to a target sequence is used to screen for target sites in cells expressing target RNA, such as cultured Jurkat, HeLa, A549 or 293T cells. The general strategy used in this approach is shown in FIG. 9. Cells expressing the target RNA are transfected with the pool of siNA constructs and cells that demonstrate a phenotype associated with target inhibition are sorted. The pool of siNA constructs can be expressed from transcription cassettes inserted into appropriate vectors (see for example FIG. 7 and FIG. 8). The siNA from cells demonstrating a positive phenotypic change (e.g., decreased proliferation, decreased target mRNA levels or decreased target protein expression), are sequenced to determine the most suitable target site(s) within the target target RNA sequence.

[0686] In one embodiment, siNA molecules of the invention are selected using the following methodology. The following guidelines were compiled to predict hyper-active siNAs that contain chemical modifications described herein. These rules emerged from a comparative analysis of hyper-active (>75% knockdown of target mRNA levels) and inactive (<75% knockdown of target mRNA levels) siNAs against several different targets. A total of 242 siNA sequences were analyzed. Thirty-five siNAs out of 242 siNAs were grouped into hyper-active and the remaining siNAs were grouped into inactive groups. The hyper-active siNAs clearly showed a preference for certain bases at particular nucleotide positions within the siNA sequence. For example, A or U nucleobase was overwhelmingly present at position 19 of the sense strand in hyper-active siNAs and opposite was true for inactive siNAs. There was also a pattern of a A/U rich (3 out of 5 bases as A or U) region between positions 15-19 and G/C rich region between positions 1-5 (3 out of 5 bases as G or C) of the sense strand in hyperactive siNAs. As shown in Table VII, 12 such patterns were identified that were characteristics of hyper-active siNAs. It is to be noted that not every pattern was present in each hyper-active siNA. Thus, to design an algorithm for predicting hyper-active siNAs, a different score was assigned for each pattern. Depending on how frequently such patterns occur in hyper-active siNAs versus inactive siNAs, the design parameters were assigned a score with the highest being 10. If a certain nucleobase is not preferred at a position, then a negative score was assigned. For example, at positions 9 and 13 of the sense strand, a G nucleotide was not preferred in hyper-active siNAs and therefore they were given score of −3(minus 3). The differential score for each pattern is given in Table VII. The pattern #4 was given a maximum score of −100. This is mainly to weed out any sequence that contains string of 4Gs or 4Cs as they can be highly incompatible for synthesis and can allow sequences to self-aggregate, thus rendering the siNA inactive. Using this algorithm, the highest score possible for any siNA is 66. As there are numerous siNA sequences possible against any given target of reasonable size (1000 nucleotides), this algorithm is useful to generate hyper-active siNAs.

[0687] In one embodiment, rules 1-11 shown in Table VII are used to generate active siNA molecules of the invention. In another embodiment, rules 1-12 shown in Table VII are used to generate active siNA molecules of the invention.

### Example 4

### siNA Design

[0688] siNA target sites were chosen by analyzing sequences of the target and optionally prioritizing the target sites on the basis of the rules presented in Example 3 above, and alternately on the basis of folding (structure of any given sequence analyzed to determine siNA accessibility to the target), or by using a library of siNA molecules as described in Example 3, or alternately by using an in vitro siNA system as described in Example 6 herein. siNA molecules were designed that could bind each target and are selected using the algorithm above and are optionally individually analyzed by computer folding to assess whether the siNA molecule can interact with the target sequence. Varying the length of the siNA molecules can be chosen to optimize activity. generally, a sufficient number of complementary nucleotide bases are chosen to bind to, or otherwise interact with, the target RNA, but the degree of complementarity can be modulated to accommodate siNA duplexes or varying length or base composition. By using such methodologies, siNA molecules can be designed to target sites within any known RNA sequence, for example those RNA sequences corresponding to the any gene transcript.

[0689] Target sequences are analysed to generate targets from which double stranded siNA are designed (Table II). To generate synthetic siNA constructs, the algorithm described in Example 3 is utilized to pick active double stranded constructs and chemically modified versions thereof. For example, in Table II, the target sequence is shown, along with the upper (sense strand) and lower (antisense strand) of the siNA duplex. Multifunctional siNAs are designed by searching for homologous sites between different target sequences (e.g., from about 5 to about 15 nucleotide regions of shared homology) and allowing for non-canonical base pairs (e.g. G:U wobble base pairing) or mismatched base pairs.

[0690] Chemically modified siNA constructs were designed as described herein (see for example Table III) to provide nuclease stability for systemic administration in vivo and/or improved pharmacokinetic, localization, and delivery properties while preserving the ability to mediate RNAi activity. Chemical modifications as described herein are introduced synthetically using synthetic methods described herein and those generally known in the art. The synthetic siNA constructs are then assayed for nuclease stability in serum and/or cellular/tissue extracts (e.g. liver extracts). The synthetic siNA constructs are also tested in parallel for RNAi activity using an appropriate assay, such as a luciferase reporter assay as described herein or another suitable assay that can quantity RNAi activity. Synthetic siNA constructs that possess both nuclease stability and RNAi activity can be further modified and re-evaluated in stability and activity assays. The chemical modifications of the stabilized active siNA constructs can then be applied to any siNA sequence targeting any chosen RNA and used, for example, in target screening assays to pick lead siNA compounds for therapeutic development (see for example FIG. 11).

### Example 5

### Chemical Synthesis and Purification of siNA

[0691] siNA molecules can be designed to interact with various sites in the RNA message, for example, target sequences within the RNA sequences described herein. The sequence of one strand of the siNA molecule(s) is complementary to the target site sequences described above. The siNA molecules can be chemically synthesized using methods described herein. Inactive siNA molecules that are used as control sequences can be synthesized by scrambling the sequence of the siNA molecules such that it is not complementary to the target sequence. generally, siNA constructs can by synthesized using solid phase oligonucleotide synthesis methods as described herein (see for example Usman et al., U.S. Pat. Nos. 5,804,683; 5,831,071; 5,998,203; 6,117,657; 6,353,098; 6,362,323; 6,437,117; 6,469,158; Scaringe et al., U.S. Pat. Nos. 6,111,086; 6,008,400; 6,111,086 all incorporated by reference herein in their entirety).

[0692] In a non-limiting example, RNA oligonucleotides are synthesized in a stepwise fashion using the phosphoramidite chemistry as is known in the art. Standard phosphoramidite chemistry involves the use of nucleosides comprising any of 5′-O-dimethoxytrityl, 2′-O-tert-butyldimethylsilyl, 3′-O-2-Cyanoethyl N,N-diisopropylphosphoroamidite groups, and exocyclic amine protecting groups (e.g. N6-benzoyl adenosine, N4 acetyl cytidine, and N2-isobutyryl guanosine). Alternately, 2′-O—Silyl Ethers can be used in conjunction with acid-labile 2′-O-orthoester protecting groups in the synthesis of RNA as described by Scaringe supra. Differing 2′ chemistries can require different protecting groups, for example 2′-deoxy-2′-amino nucleosides can utilize N-phthaloyl protection as described by Usman et al., U.S. Pat. No. 5,631,360, incorporated by reference herein in its entirety).

[0693] During solid phase synthesis, each nucleotide is added sequentially (3′- to 5′-direction) to the solid support-bound oligonucleotide. The first nucleoside at the 3′-end of the chain is covalently attached to a solid support (e.g., controlled pore glass or polystyrene) using various linkers. The nucleotide precursor, a ribonucleoside phosphoramidite, and activator are combined resulting in the coupling of the second nucleoside phosphoramidite onto the 5′-end of the first nucleoside. The support is then washed and any unreacted 5′-hydroxyl groups are capped with a capping reagent such as acetic anhydride to yield inactive 5′-acetyl moieties. The trivalent phosphorus linkage is then oxidized to a more stable phosphate linkage. At the end of the nucleotide addition cycle, the 5′-O-protecting group is cleaved under suitable conditions (e.g., acidic conditions for trityl-based groups and fluoride for silyl-based groups). The cycle is repeated for each subsequent nucleotide.

[0694] Modification of synthesis conditions can be used to optimize coupling efficiency, for example by using differing coupling times, differing reagent/phosphoramidite concentrations, differing contact times, differing solid supports and solid support linker chemistries depending on the particular chemical composition of the siNA to be synthesized. Deprotection and purification of the siNA can be performed as is generally described in Usman et al., U.S. Pat. No. 5,831,071, U.S. Pat. No. 6,353,098, U.S. Pat. No. 6,437,117, and Bellon et al., U.S. Pat. No. 6,054,576, U.S. Pat. No. 6,162,909, U.S. Pat. No. 6,303,773, or Scaringe supra, incorporated by reference herein in their entireties. Additionally, deprotection conditions can be modified to provide the best possible yield and purity of siNA constructs. For example, applicant has observed that oligonucleotides comprising 2′-deoxy-2′-fluoro nucleotides can degrade under inappropriate deprotection conditions. Such oligonucleotides are deprotected using aqueous methylamine at about 35° C. for 30 minutes. If the 2′-deoxy-2′-fluoro containing oligonucleotide also comprises ribonucleotides, after deprotection with aqueous methylamine at about 35° C. for 30 minutes, TEA-HF is added and the reaction maintained at about 65° C. for an additional 15 minutes. The deprotected single strands of siNA are purified by anion exchange to achieve a high purity while maintaining high yields. To form the siNA duplex molecule the single strands are combined in equal molar ratios in a saline solution to form the duplex. The duplex siNA is concentrated and desalted by tangential filtration prior to lyophilization

### Example 6

### RNAi In Vitro Assay to Assess siNA Activity

[0695] An in vitro assay that recapitulates RNAi in a cell-free system is used to evaluate siNA constructs targeting target RNA targets. The assay comprises the system described by Tuschl et al., 1999, genes and Development, 13, 3191-3197 and Zamore et al., 2000, Cell, 101, 25-33 adapted for use with a target RNA. A Drosophila extract derived from syncytial blastoderm is used to reconstitute RNAi activity in vitro. Target RNA is generated via in vitro transcription from an appropriate target expressing plasmid using T7 RNA polymerase or via chemical synthesis as described herein. Sense and antisense siNA strands (for example 20 uM each) are annealed by incubation in buffer (such as 100 mM potassium acetate, 30 mM HEPES-KOH, pH 7.4, 2 mM magnesium acetate) for 1 minute at 90° C. followed by 1 hour at 37° C., then diluted in lysis buffer (for example 100 mM potassium acetate, 30 mM HEPES-KOH at pH 7.4, 2 mM magnesium acetate). Annealing can be monitored by gel electrophoresis on an agarose gel in TBE buffer and stained with ethidium bromide. The Drosophila lysate is prepared using zero to two-hour-old embryos from Oregon R flies collected on yeasted molasses agar that are dechorionated and lysed. The lysate is centrifuged and the supernatant isolated. The assay comprises a reaction mixture containing 50% lysate [vol/vol], RNA (10-50 μM final concentration), and 10% [vol/vol] lysis buffer containing siNA (10 nM final concentration). The reaction mixture also contains 10 mM creatine phosphate, 10 ug/ml creatine phosphokinase, 100 um GTP, 100 uM UTP, 100 uM CTP, 500 uM ATP, 5 mM DTT, 0.1 U/uL RNasin (Promega), and 100 uM of each amino acid. The final concentration of potassium acetate is adjusted to 100 mM. The reactions are pre-assembled on ice and preincubated at 25° C. for 10 minutes before adding RNA, then incubated at 25° C. for an additional 60 minutes. Reactions are quenched with 4 volumes of 1.25× Passive Lysis Buffer (Promega). Target RNA cleavage is assayed by RT-PCR analysis or other methods known in the art and are compared to control reactions in which siNA is omitted from the reaction.

[0696] Alternately, internally-labeled target RNA for the assay is prepared by in vitro transcription in the presence of [alpha-³²P] CTP, passed over a G50 Sephadex column by spin chromatography and used as target RNA without further purification. Optionally, target RNA is 5′-³²P-end labeled using T4 polynucleotide kinase enzyme. Assays are performed as described above and target RNA and the specific RNA cleavage products generated by RNAi are visualized on an autoradiograph of a gel. The percentage of cleavage is determined by PHOSPHOR IMAGER® (autoradiography) quantitation of bands representing intact control RNA or RNA from control reactions without siNA and the cleavage products generated by the assay.

[0697] In one embodiment, this assay is used to determine target sites in the target RNA target for siNA mediated RNAi cleavage, wherein a plurality of siNA constructs are screened for RNAi mediated cleavage of the target RNA target, for example, by analyzing the assay reaction by electrophoresis of labeled target RNA, or by northern blotting, as well as by other methodology well known in the art.

### Example 7

### Nucleic Acid Inhibition of HCV Target RNA In Vivo

[0698] siNA molecules targeted to the human HCV RNA are designed and synthesized as described above. These nucleic acid molecules can be tested for cleavage activity in vivo, for example, using the following procedure. The target sequences and the nucleotide location within the HCV RNA are given in Tables II and III.

[0699] Two formats are used to test the efficacy of siNAs targeting HCV. First, the reagents are tested in cell culture using, for example, human hepatoma (Huh7) cells, to determine the extent of RNA and protein inhibition. siNA reagents (e.g.; see Tables II and III) are selected against the HCV target as described herein. RNA inhibition is measured after delivery of these reagents by a suitable transfection agent to, for example, cultured epidermal keratinocytes. Relative amounts of target RNA are measured versus actin using real-time PCR monitoring of amplification (eg., ABI 7700 TAQMAN®). A comparison is made to a mixture of oligonucleotide sequences made to unrelated targets or to a randomized siNA control with the same overall length and chemistry, but randomly substituted at each position. Primary and secondary lead reagents are chosen for the target and optimization performed. After an optimal transfection agent concentration is chosen, a RNA time-course of inhibition is performed with the lead siNA molecule. In addition, a cell-plating format can be used to determine RNA inhibition.

[0700] In addition, a cell-plating format can be used to determine RNA inhibition. This system is described in Rice et al., U.S. Pat. No. 5,874,565 and U.S. Pat. No. 6,127,116, both incorporated by reference herein.

Delivery of siNA to Cells

[0701] Huh7b cells stably transfected with the HCV subgenomic replicon Clone A or Ava.5 are seeded, for example, at 8.5×10³ cells per well of a 96-well platein DMEM (Gibco) the day before transfection. siNA (final concentration, for example 25 nM) and cationic lipid Lipofectamine2000 (e.g., final concentration 0.5 ul/well) are complexed in Optimem (Gibco) at 37° C. for 20 minutes in polypropylene microtubes. Following vortexing, the complexed siNA is added to each well and incubated for 24-72 hours.

TAQMAN® (Real-Time PCR Monitoring of Amplification) and Lightcycler Quantification of mRNA

[0702] Total RNA is prepared from cells following siNA delivery, for example, using Qiagen RNA purification kits for 6-well or Rneasy extraction kits for 96-well assays. For TAQMAN® analysis (real-time PCR monitoring of amplification), dual-labeled probes are synthesized with the reporter dye, FAM or JOE, covalently linked at the 5′-end and the quencher dye TAMRA conjugated to the 3′-end. One-step RT-PCR amplifications are performed on, for example, an ABI PRISM 7700 Sequence Detector using 50 μl reactions consisting of 10 μl total RNA, 100 nM forward primer, 900 nM reverse primer, 100 nM probe, 1× TaqMan PCR reaction buffer (PE-Applied Biosystems), 5.5 mM MgCl₂, 300 μM each dATP, dCTP, dGTP, and dTTP, 10 U RNase Inhibitor (Promega), 1.25 U AMPLITAQ GOLD° (DNA polymerase) (PE-Applied Biosystems) and 10 U M-MLV Reverse Transcriptase (Promega). The thermal cycling conditions can consist of 30 minutes at 48° C., 10 minutes at 95° C., followed by 40 cycles of 15 seconds at 95° C. and 1 minute at 60° C. Quantitation of mRNA levels is determined relative to standards generated from serially diluted total cellular RNA (300, 100, 33, 11 ng/reaction) and normalizing to β-actin or GAPDH mRNA in parallel TAQMAN® reactions (real-time PCR monitoring of amplification). For each gene of interest an upper and lower primer and a fluorescently labeled probe are designed. Real time incorporation of SYBR Green I dye into a specific PCR product can be measured in glass capillary tubes using a lightcyler. A standard curve is generated for each primer pair using control cRNA. Values are represented as relative expression to GAPDH in each sample.

### Western Blotting

[0703] Total RNA is prepared from cells following siNA delivery, for example, using Ambion Rnaqueous 4-PCR purification kit for large scale extractions, or Ambion Rnaqueous-96 purification kit for 96-well assays. For Taqman analysis, dual-labeled probes are synthesized with, for example, the reporter dyes FAM or VIC covalently linked at the 5′-end and the quencher dye TAMARA conjugated to the 3′-end. One-step RT-PCR amplifications are performed on, for example, an ABI PRISM 7700 Sequence detector using 50 uL reactions consisting of 10 uL total RNA, 100 nM forward primer, 100 nM reverse primer, 100 nM probe, 1× TaqMan PCR reaction buffer (PE-Applied Biosystems), 5.5 mM MgCl2, 100 uM each dATP, dCTP, dGTP and dTTP, 0.2 U RNase Inhibitor (Promega), 0.025 U AmpliTaq Gold (PE-Applied Biosystems) and 0.2 U M-MLV Reverse Transcriptase (Promega). The thermal cycling conditions can consist of 30 minutes at 48° C., 10 minutes at 95° C., followed by 40 cycles of 15 seconds at 95° C. and 1 minute at 60° C. Quantitation of target mRNA level is determined relative to standards generated from serially diluted total cellular RNA (300, 100, 30, 10 ng/r×n) and normalizing to, for example, 36B4 mRNA in either parallel or same tube TaqMan reactions. For HCV Replicon mRNA quantitation, PCR primers and probe specific for the neomycin gene were used:

neo-forward primer,

(SEQ ID NO: 2150)

5′-CCGGCTACCTGCCCATTC-3′;
neo-reverse primer,

(SEQ ID NO: 2151)

5′-CCAGATCATCCTGATCGACAAG-3′;
neo-probe,

(SEQ ID NO: 2152)

5′FAM-ACATCGCATCGAGCGAGCACGTAC-TAMARA3′;

For normalization, 36B4 PCR primers and probe were used:

36B4-forward primer,

(SEQ ID NO: 2153)

5′-TCTATCATCAACGGGTACAAACGA-3′;
36B4 reverse primer,

(SEQ ID NO: 2154)

5′-CTTTTCAGCAAGTGGGAAGGTG-3′;
36B4 probe,

(SEQ ID NO: 2155)

5′VIC-CCTGGCCTTGTCTGTGGAGACGGATTA-TAMARA3′;

### Example 8

### Models Useful to Evaluate the Down-Regulation of HCV Gene Expression

### Cell Culture

[0704] Although there have been reports of replication of HCV in cell culture (see below), these systems are difficult to reproduce and have proven unreliable. Therefore, as was the case for development of other anti-HCV therapeutics, such as interferon and ribavirin, after demonstration of safety in animal studies applicant can proceed directly into a clinical feasibility study.

[0705] Several recent reports have documented in vitro growth of HCV in human cell lines (Mizutani et al., Biochem Biophys Res Commun 1996 227(3):822-826; Tagawa et al., Journal of Gasteroenterology and Hepatology 1995 10(5):523-527; Cribier et al., Journal of General Virology 76(10):2485-2491; Seipp et al., Journal of General Virology 1997 78(10)2467-2478; Iacovacci et al., Research Virology 1997 148(2):147-151; Iocavacci et al., Hepatology 1997 26(5) 1328-1337; Ito et al., Journal of General Virology 1996 77(5):1043-1054; Nakajima et al., Journal of Virology 1996 70(5):3325-3329; Mizutani et al., Journal of Virology 1996 70(10):7219-7223; Valli et al., Res Virol 1995 146(4): 285-288; Kato et al., Biochem Biophys Res Comm 1995 206(3):863-869). Replication of HCV has been reported in both T and B cell lines, as well as cell lines derived from human hepatocytes. Detection of low level replication was documented using either RT-PCR based assays or the b-DNA assay. It is important to note that the most recent publications regarding HCV cell cultures document replication for up to 6-months. However, the level of HCV replication observed in these cell lines has not been robust enough for screening of antiviral compounds.

[0706] In addition to cell lines that can be infected with HCV, several groups have reported the successful transformation of cell lines with cDNA clones of full-length or partial HCV genomes (Harada et al., Journal of General Virology, 1995, 76(5)1215-1221; Haramatsu et al., Journal of Viral Hepatitis 1997 4S(1):61-67; Dash et al., American Journal of Pathology 1997 151(2):363-373; Mizuno et al., Gasteroenterology 1995 109(6):1933-40; Yoo et al., Journal Of Virology 1995 69(1):32-38).

[0707] The recent development of subgenomic HCV RNA replicons capable of successfully replicating in the human hepatoma cell line, Huh7, represents a significant advance toward a dependable cell culture model. These replicons contain the neomycin gene upstream of the HCV nonstructural genes allowing for the selection of replicative RNAs in Huh7 cells. Initially, RNA replication was detected at a low frequency (Lohmann et al. Science 1999 285: 110-113) but the identification of replicons with cell-adaptive mutations in the NS5A region has improved the efficiency of replication 10,000-fold (Blight et al. Science 2000 290:1972-1975). Steps in the HCV life cycle, such as translation, protein processing, and RNA replication are recapitulated in the subgenomic replicon systems, but early events (viral attachment and uncoating) and viral assembly is absent. Inclusion of the structural genes of HCV within the replicons results in the production of HCV core and envelope proteins, but virus assembly does not occur (Pietschmann et al. Journal of Virology 2002 76: 4008-4021). Such replicon systems have been used to study siRNA mediated inhibition of HCV RNA, see for example, Randall et al., 2003, PNAS USA, 100, 235-240.

[0708] In several cell culture systems, cationic lipids have been shown to enhance the bioavailability of oligonucleotides to cells in culture (Bennet, et al., 1992, Mol. Pharmacology, 41, 1023-1033). In one embodiment, siNA molecules of the invention are complexed with cationic lipids for cell culture experiments. siNA and cationic lipid mixtures are prepared in serum-free DMEM immediately prior to addition to the cells. DMEM plus additives are warmed to room temperature (about 20-25° C.) and cationic lipid is added to the final desired concentration and the solution is vortexed briefly. siNA molecules are added to the final desired concentration and the solution is again vortexed briefly and incubated for 10 minutes at room temperature. In dose response experiments, the RNA/lipid complex is serially diluted into DMEM following the 10 minute incubation.

### Animal Models

[0709] Evaluating the efficacy of anti-HCV agents in animal models is an important prerequisite to human clinical trials. The best characterized animal system for HCV infection is the chimpanzee. Moreover, the chronic hepatitis that results from HCV infection in chimpanzees and humans is very similar. Although clinically relevant, the chimpanzee model suffers from several practical impediments that make use of this model difficult. These include high cost, long incubation requirements and lack of sufficient quantities of animals. Due to these factors, a number of groups have attempted to develop rodent models of chronic hepatitis C infection. While direct infection has not been possible, several groups have reported on the stable transfection of either portions or entire HCV genomes into rodents (Yamamoto et al., Hepatology 1995 22(3): 847-855; Galun et al., Journal of Infectious Disease 1995 172(1):25-30; Koike et al., Journal of general Virology 1995 76(12)3031-3038; Pasquinelli et al., Hepatology 1997 25(3): 719-727; Hayashi et al., Princess Takamatsu Symp 1995 25:1430149; Mariya et al., Journal of General Virology 1997 78(7) 1527-1531; Takehara et al., Hepatology 1995 21(3):746-751; Kawamura et al., Hepatology 1997 25(4): 1014-1021). In addition, transplantation of HCV infected human liver into immunocompromised mice results in prolonged detection of HCV RNA in the animal's blood.

[0710] A method for expressing hepatitis C virus in an in vivo animal model has been developed (Vierling, International PCT Publication No. WO 99/16307). Viable, HCV infected human hepatocytes are transplanted into a liver parenchyma of a scid/scid mouse host. The scid/scid mouse host is then maintained in a viable state, whereby viable, morphologically intact human hepatocytes persist in the donor tissue and hepatitis C virus is replicated in the persisting human hepatocytes. This model provides an effective means for the study of HCV inhibition by enzymatic nucleic acids in vivo.

[0711] As such, these models can be used in evaluating the efficacy of siNA molecules of the invention in inhibiting HCV expression. These models and others can similarly be used to evaluate the safety and efficacy of siNA molecules of the invention in a pre-clinical setting.

### Example 9

### RNAi Mediated Inhibition of Target Gene Expression

[0712] In Vitro siNA Mediated Inhibition of Target RNA

[0713] siNA constructs (Table III) are tested for efficacy in reducing HCV RNA expression in, for example, Huh7 cells. Cells are plated approximately 24 hours before transfection in 96-well plates at 5,000-7,500 cells/well, 100 μl/well, such that at the time of transfection cells are 70-90% confluent. For transfection, annealed siNAs are mixed with the transfection reagent (Lipofectamine 2000, Invitrogen) in a volume of 50 μl/well and incubated for 20 minutes at room temperature. The siNA transfection mixtures are added to cells to give a final siNA concentration of 25 nM in a volume of 150 μl. Each siNA transfection mixture is added to 3 wells for triplicate siNA treatments. Cells are incubated at 37° for 24 hours in the continued presence of the siNA transfection mixture. At 24 hours, RNA is prepared from each well of treated cells. The supernatants with the transfection mixtures are first removed and discarded, then the cells are lysed and RNA prepared from each well. Target gene expression following treatment is evaluated by RT-PCR for the target gene and for a control gene (36B4, an RNA polymerase subunit) for normalization. The triplicate data is averaged and the standard deviations determined for each treatment. Normalized data are graphed and the percent reduction of target mRNA by active siNAs in comparison to their respective inverted control siNAs is determined.

### Example 10

### Evaluation of siNA Molecules in Marmosets

[0714] GBV-B is very closely related to human hepatitis C virus and causes hepatitis in tamarins and marmosets. Thus, GBV-B provides a small animal model for testing antiviral compounds and vaccines for HCV infection. This study investigated the efficacy of LNP formulated double stranded siNA molecules targeting HCV RNA sites 293 and 316. The GBV-B model is an excellent system to test whether this therapy is likely to work on humans chronically infected with HCV.

[0715] In the study, 2 animals were inoculated with GBV-B and IV treatment with the active formulated siNA (Sirna Compound Nos. 33149/47677 and 31703/38756, Formulation LNP-086; see Tables III and VI) at 3 mg/kg was initiated one day post infection. Active compositions were formulated as is described in U.S. Provisional patent application No. 60/737,024, filed Nov. 15, 2005. Another 2 animals were inoculated with GBV-B and were untreated to serve as negative controls. The animals were monitored to determine the effect of the therapy of GBV-B infection. Blood draws were performed over the course of the study to determine viral titers. Dosing of formulated siNA in the treated animals was repeated at days 1, 3, and 7 after inoculation at day 0. These animals show a profound inhibition of GBV-B over a three week time course compared to the untreated control animals (see FIG. 30). In addition, an animal with established GBV infection was treated with active formulated siNA (Sirna Compound Nos. 33149/47677 and 31703/38756, Formulation LNP-086; see Tables III and VI) at days 28, 31, and 35 post infection. This animal showed a decrease in viral titer down to the limit of detection following the dosing of active compound (see FIG. 31) compared to historic untreated controls.

### Example 11

### Evaluation of siNA Molecules in Chimpanzees

[0716] This study is used to evaluate double stranded nucleic acid antiviral formulations for the ability to suppress hepatitis C virus (HCV) replication in HCV-infected chimpanzees. The compound formulation contains siNA directed at the HCV viral genome and that mediates degradation of the viral RNA via RNA interference. The compound is administered by IV. The chimpanzees to be used are selected from a group of HCV chronic animals. The study is conducted in two phases: pharmacokinetics and efficacy.

[0717] The pharmacokinetics portion of the study is conducted in two non-HCV-infected animals. Blood samples are obtained at time 0, 15 min, 30 min, 24 hr, and days 3, 7 and 14. Liver biopsies are obtained at 24 hr and 14 days. The efficacy involves testing of the antiviral compound in 2 or more HCV infected chimpanzees.

[0718] Animals receive 4 weekly IV injections with the antiviral siNA formulation. Blood samples are obtained at −4, −2, and 0 weeks, then weekly for 6 weeks, and then every other week for 4 additional weeks. Liver biopsies are obtained at −4 weeks and +4 weeks (one week after last injection). A blood and tissue sampling schedule is shown below. The animals are monitored for blood chemistries and CBC at all bleeds. At the sign of any serious adverse effects, treatment is stopped. For each animal, a total of 11 blood samples are requested to monitor the viral RNA levels in the serum. Liver needle biopsies are requested at two time points for analysis of viral RNA load in the liver, level of siNA compound targeted to liver, the presence of siNA induced viral RNA cleavage products, and changes in liver gene expression. Viral RNA is monitored by real time TaqMan quantitative RT-PCR. Serum samples are extracted in duplicate and run in quadruplicate. Liver RNA levels are run in duplicate.

Schedule for SINA PK Study in 2 Uninfected Chimpanzees

| Days Weeks | | | | | |
|---|---|---|---|---|---|
| Biopsy | Dosing IV | Serum | CBC | Chemistries | Liver |
| Day 0, | X | 10 ml | 2 ml | 3 ml | |
| Day 0, 15 min | | 10 ml | 2 ml | 3 ml | |
| Day 0, 30 min | | 10 ml | 2 ml | 3 ml | |
| Day 1, 24 hr | | 10 ml | 2 ml | 3 ml | X |
| Day 3 | | 10 ml | 2 ml | 3 ml | |
| Day 7 | | 10 ml | 2 ml | 3 ml | |
| Day 14 | | 10 ml | 2 ml | 3 ml | X |

Blood, 1 × SST tube to Lanford Lab. Processed in 1 ml frozen aliquots.
Biopsies frozen.

Schedule for SINA Efficacy Study in 2 HCV Chronic Chimpanzees

| Weeks | | | | | |
|---|---|---|---|---|---|
| Biopsy | Dosing IV | Serum | CBC | Chemistries | Liver |
| Pre −4 | | 20 ml | 2 ml | 3 ml | X |
| Pre −2 | | 20 ml | 2 ml | 3 ml | |
| Day 0, Wk 0 | X | 20 ml | 2 ml | 3 ml | |
| Day 7, Wk 1 | X | 20 ml | 2 ml | 3 ml | |
| Wk 2 | X | 20 ml | 2 ml | 3 ml | |
| Wk 3 | X | 20 ml | 2 ml | 3 ml | |
| Wk 4 | | 20 ml | 2 ml | 3 ml | X |
| Wk 5 | | 20 ml | 2 ml | 3 ml | |
| Wk 6 | | 20 ml | 2 ml | 3 ml | |
| Wk 8 | | 20 ml | 2 ml | 3 ml | |
| Wk 10 | | 20 ml | 2 ml | 3 ml | |

Blood, 2 × SST tube to Lanford Lab. Processed in 1 ml frozen aliquots.
Biopsies frozen. Divided in half, process half for RNA with RNAzol for viral RNA.

### Example 12

### Safety, Tolerability, PK, PD and Anti-Viral Effects of Single and Multiple Dose Administration of SIRNA-AV34 in Interferon-Naïve and Experienced Patients with Chronic HCV Infection

[0719] The primary objective of this study are to establish the MTD of single and multiple doses of Sirna-034 in HCV-positive patients. A secondary objective is to evaluate the single dose and steady-state pharmacokinetics of Sirna-034; to evaluate the pharmacodynamics of single and multiple doses of Sirna-034; and to assess the effect of single and multiple doses of Sirna-034 on indices of viral replication and infectivity.

[0720] This is a Phase I/II, randomized, double-blind, placebo-controlled, single- and multiple-dose escalation study of Sirna-034 in patients with chronic hepatitis C infection and compensated hepatic function. Patients meeting eligibility criteria are be enrolled into 4-6 sequential groups for the SAD portion of the study. Each patient is admitted to a clinical research unit for treatment administration and discharged 36 hours after dosing unless further intensive monitoring is considered necessary by the investigator. Patients have daily visits to the clinic for five additional days, and receive a follow-up phone call for SAEs 30 days after dosing. Dose escalation is dependent on safety parameters (physical examination findings, vital signs, adverse events, and laboratory values) from the preceding group.

[0721] At screening for the SAD phase, patients undergo phlebotomy for assessment of serum chemistry, hematology, coagulation parameters, serum beta-HCG (women only), HIV antibody status, HBsAg, alpha feto-protein, quantitative HCV viral RNA and HCV genotyping, and provide urine for urinalysis. During the treatment phase, clinical laboratories (chemistry, hematology, coagulation parameters and urinalysis) are assessed pre-dose, and 24 hours, 3 d and 6 d after dosing. ECG are assessed pre-dose and 4-6 hours and 6 days after dosing. Physical exam is conducted pre-dose and 6 days after dosing. Serum samples for PK analysis are collected pre-dose, and 30 minutes, 1, 2, 3, 4, 6, 8, 12, 24 and 36 hours, and 2, 3, 4, 5, and 6 days after dosing. Assessments of viral RNA and potentially another marker of viral infectivity is performed pre-dose and 1, 2, 3, 4, 5, and 6 days after dosing.

[0722] Once the dose of Sirna-034 that is well-tolerated results in approximately 90% reduction in viral load has been determined, patients are enrolled into the MAD portion of the study. Patients from the SAD portion of the study who choose to participate in the MAD phase undergo limited re-screening consisting of interval history, physical exam, clinical laboratory assessment, and quantitative HCV viral RNA. New enrollees undergo full re-screening as outlined for the SAD phase, above. Patients enrolled in once weekly dosing regimen visit the study site weekly×4, 7 days after the last dose, and receive a telephone call for SAEs 30 d after the last dose. Patients randomized to an every other week dosing regimen visit the study site 2 times and have similar post-treatment follow-up. Dose escalation is dependent on safety parameters (physical examination findings, vital signs, adverse events, and laboratory values) from the preceding group.

[0723] During the MAD treatment phase, clinical laboratories (chemistry, hematology, coagulation parameters and urinalysis) are assessed prior to administration of each dose, and 7 days after the last dose. ECG is assessed before the first dose, and 7 days after the last dose. Physical exam is conducted pre-dose, after the last dose and 7 days after the last dose. Serum samples for PK analysis are collected before and 2, 4, 8, 12 and 24 hours after the first dose, before each subsequent dose, and 2, 4, 8, 12 and 24 hours and 7 days after the last dose. Assessments of viral RNA and potentially another marker of viral infectivity is performed prior to the first dose and then weekly up to 7 days after the last dose.

### Diagnosis and Main Criteria for Inclusion/Exclusion:

[0724] Men and women who are not of child-bearing potential; 18 to 60 years of age; HCV-positive; elevated ALT at screening and on one other occasion within the prior 6 months; HIV negative; HBsAg negative; normal PT, PTT, hemoglobin, bilirubin, albumin and alpha feto-protein; platelet count >100K; no other known cause of liver disease; either interferon naïve, relapsed after interferon, or non-responder to interferon.

### Dosage and Mode of Administration:

[0725] Liquid solution for IV injection, 0.1 to 10 mg/ml of Sirna-034. For the SAD portion of the study, the starting dose is TBD, but estimate 1/50 of NOAEL from 4 week monkey toxicology study. Dose to be escalated to MTD. For the MAD portion of the study, the single dose that produces 90% reduction of viral load, if well-tolerated as single doses, will be administered to sequential cohorts dosed either weekly or every other week×4 weeks.

### Duration of Patient Participation/Duration of Study/Duration of Treatment:

[0726] For SAD period, duration of treatment will be 42 days (range, 38 to 49) consisting of a 1-14 day screening period, 1-day treatment with 36 hours in inpatient observation, five additional days of outpatient observation and 30 day SAE follow-up (via telephone). During the MAD phase, the same patients, as well as newly-recruited patients as necessary, will be treated for 72 days (range, 65 to 79) consisting of a 0-14 day screening period, 4 week treatment period, 7 day follow-up period and 30 day SAE follow-up (via telephone). As a result, the duration of patient participation for those patients enrolled in both phases of the study may be up to 128 days, not including any intervening periods between the SAD and MAD portions of the study.

### Reference Therapy, Dosage and Mode of Administration:

[0727] Placebo will be formulated as a liquid solution for IV injection and be identical in appearance to Sirna-034.

### Criteria for Evaluation

[0728] For Efficacy and Pharmacodynamics, HCV viral RNA will be evaluated possibly along with a novel biologic marker of HCV capsid protein processing or viral infectivity. For Safety, vital signs, adverse events, standard laboratory tests, and physical examinations will be monitored.

### Statistical Methods

[0729] Incidence of adverse events, signs, symptoms, ECG parameters and laboratory findings; descriptive statistics of changes in ECG parameters and laboratory values, PK and PD parameters; and exploratory analyses of measures of viral load, replication and infectivity.

[0730] The main objective of the Clinical Plan is to assess the safety and efficacy of Sirna-034 as a potential treatment for Chronic Hepatitis C in such a way as to support the Target Profile (TP) and meet requirements for registration. The total number of subjects to be studied in the entire plan is about 1200.

[0731] This CP for Sirna-034 is designed to validate the TP and to meet regulatory requirements for registration as a treatment for Chronic Hepatitis C. The initial claim will be that Sirna-034 is indicated for the treatment of Chronic Hepatitis C in combination with PEG-Interferon and ribavirin in patient non responding to PEG-Interferon and ribavirin, who have compensate liver disease and 18 year of age and older.

[0732] A Phase I/II Dose Escalation study in patients with compensated and previously treated or untreated chronic hepatitis C will establish the safety of multiple dose administration (weekly ascending doses for 4 week or every two weeks for four weeks), the extent of systemic exposure to the compound, and establish a “proof of mechanism” as effective monotherapy through analysis of serum HCV RNA (reduction of 1-2 logs).

[0733] This will be followed by a formal Phase II dose finding study in combination PEG-Interferon and ribavirin in clinically active hepatitis C patients non responding to PEG-Interferon and ribavirin. The 48-week study will provide data on the safety, effectiveness and PK of the triple combination, with Sirna-034 administered weekly.

[0734] The Phase III studies will be randomized, placebo-controlled studies which will confirm evidence of efficacy and provide further safety data of the compound. Two pivotal randomized, placebo-controlled multi-national Phase III studies will be designed to confirm efficacy and provide safety data to support registration. Primary efficacy endpoints will be at 24 weeks following the end of 48-week treatment, represented by undetectable HCV RNA and normalization of ALT. At the time of registration, over 1200 patients will have been exposed to Sirna-034.

[0735] Sirna-034 is a modified anti-HCV siNA consisting of two Sirna duplexes (Sirna Compound Nos. 33149/47677 and 31703/38756, (SEQ ID NOs: 1796/2102 and 1677/2103) formulated as LNP-086, which consists of CLinDMA/DSPC/Cholesterol/PEG-DMG/Linoleyl alcohol in a molar ration of 43/38/10/2/7; see Tables III and VI) that has the potential to inhibit HCV replication. Sirna-034 targets HCV mRNA sites 293 and 316. Sirna-034 is expected to improve the patient's overall symptomatic response to conventional therapy (PEG-Interferon and ribavirin), and will provide the best opportunity to safely minimize a subject's susceptibility to the risk of the disability, morbidity and mortality caused by HCV infection.

### Example 13

### Indications

[0736] The present body of knowledge in HCV research indicates the need for methods to assay HCV activity and for compounds that can regulate HCV expression for research, diagnostic, and therapeutic use. As described herein, the nucleic acid molecules of the present invention can be used in assays to diagnose disease state related of HCV levels. In addition, the nucleic acid molecules can be used to treat disease state related to HCV levels.

[0737] Particular degenerative and disease states that can be associated with HCV expression modulation include, but are not limited to, HCV infection, liver failure, hepatocellular carcinoma, cirrhosis, and/or other disease states associated with HCV infection.

### Example 14

### Interferons

[0738] Interferons represent a non-limiting example of a class of compounds that can be used in conduction with the siNA molecules of the invention for treating the diseases and/or conditions described herein. Type I interferons (IFN) are a class of natural cytokines that includes a family of greater than 25 IFN-α (Pesta, 1986, Methods Enzymol. 119, 3-14) as well as IFN-β, and IFN-ω. Although evolutionarily derived from the same gene (Diaz et al., 1994, Genomics 22, 540-552), there are many differences in the primary sequence of these molecules, implying an evolutionary divergence in biologic activity. All type I IFN share a common pattern of biologic effects that begin with binding of the IFN to the cell surface receptor (Pfeffer & Strulovici, 1992, Transmembrane secondary messengers for IFN-α/β. In: Interferon. Principles and Medical Applications, S. Baron, D. H. Coopenhaver, F. Dianzani, W. R. Fleischmann Jr., T. K. Hughes Jr., G. R. Kimpel, D. W. Niesel, G. J. Stanton, and S. K. Tyring, eds. 151-160). Binding is followed by activation of tyrosine kinases, including the Janus tyrosine kinases and the STAT proteins, which leads to the production of several IFN-stimulated gene products (Johnson et al., 1994, Sci. Am. 270, 68-75). The IFN-stimulated gene products are responsible for the pleotropic biologic effects of type I IFN, including antiviral, antiproliferative, and immunomodulatory effects, cytokine induction, and HLA class I and class II regulation (Pestka et al., 1987, Annu. Rev. Biochem 56, 727). Examples of IFN-stimulated gene products include 2-5-oligoadenylate synthetase (2-5 OAS), β2-microglobulin, neopterin, p68 kinases, and the Mx protein (Chebath & Revel, 1992, The 2-5 A system: 2-5 A synthetase, isospecies and functions. In: Interferon. Principles and Medical Applications, S. Baron, D. H. Coopenhaver, F. Dianzani, W. R. Jr. Fleischmann, T. K. Jr Hughes, G. R. Kimpel, D. W. Niesel, G. J. Stanton, and S. K. Tyring, eds., pp. 225-236; Samuel, 1992, The RNA-dependent P1/eIF-2α protein kinase. In: Interferon. Principles and Medical Applications. S. Baron, D. H. Coopenhaver, F. Dianzani, W. R. Fleischmann Jr., T. K. Hughes Jr., G. R. Kimpel, D. W. Niesel, G. H. Stanton, and S. K. Tyring, eds. 237-250; Horisberger, 1992, Mx protein: function and Mechanism of Action. In: Interferon. Principles and Medical Applications. S. Baron, D. H. Coopenhaver, F. Dianzani, W. R. Fleischmann Jr., T. K. Hughes Jr., G. R. Kimpel, D. W. Niesel, G. H. Stanton, and S. K. Tyring, eds. 215-224). Although all type I IFN have similar biologic effects, not all the activities are shared by each type I IFN, and in many cases, the extent of activity varies quite substantially for each IFN subtype (Fish et al, 1989, J. Interferon Res. 9, 97-114; Ozes et al., 1992, J. Interferon Res. 12, 55-59). More specifically, investigations into the properties of different subtypes of IFN-α and molecular hybrids of IFN-α have shown differences in pharmacologic properties (Rubinstein, 1987, J. Interferon Res. 7, 545-551). These pharmacologic differences can arise from as few as three amino acid residue changes (Lee et al., 1982, Cancer Res. 42, 1312-1316).

[0739] Eighty-five to 166 amino acids are conserved in the known IFN-α subtypes. Excluding the IFN-α pseudogenes, there are approximately 25 known distinct IFN-α subtypes. Pairwise comparisons of these nonallelic subtypes show primary sequence differences ranging from 2% to 23%. In addition to the naturally occurring IFNs, a non-natural recombinant type I interferon known as consensus interferon (CIFN) has been synthesized as a therapeutic compound (Tong et al., 1997, Hepatology 26, 747-754).

[0740] Interferon is currently in use for at least 12 different indications, including infectious and autoimmune diseases and cancer (Borden, 1992, N. Engl. J. Med. 326, 1491-1492). For autoimmune diseases, IFN has been utilized for treatment of rheumatoid arthritis, multiple sclerosis, and Crohn's disease. For treatment of cancer, IFN has been used alone or in combination with a number of different compounds. Specific types of cancers for which IFN has been used include squamous cell carcinomas, melanomas, hypernephromas, hemangiomas, hairy cell leukemia, and Kaposi's sarcoma. In the treatment of infectious diseases, IFNs increase the phagocytic activity of macrophages and cytotoxicity of lymphocytes and inhibits the propagation of cellular pathogens. Specific indications for which IFN has been used as treatment include hepatitis B, human papillomavirus types 6 and 11 (i.e. genital warts) (Leventhal et al., 1991, N Engl J Med 325, 613-617), chronic granulomatous disease, and hepatitis C virus.

[0741] Numerous well controlled clinical trials using IFN-alpha in the treatment of chronic HCV infection have demonstrated that treatment three times a week results in lowering of serum ALT values in approximately 50% (range 40% to 70%) of patients by the end of 6 months of therapy (Davis et al., 1989, N. Engl. J. Med. 321, 1501-1506; Marcellin et al., 1991, Hepatology 13, 393-397; Tong et al., 1997, Hepatology 26, 747-754; Tong et al., Hepatology 26, 1640-1645). However, following cessation of interferon treatment, approximately 50% of the responding patients relapsed, resulting in a “durable” response rate as assessed by normalization of serum ALT concentrations of approximately 20 to 25%. In addition, studies that have examined six months of type 1 interferon therapy using changes in HCV RNA values as a clinical endpoint have demonstrated that up to 35% of patients will have a loss of HCV RNA by the end of therapy (Tong et al., 1997, supra). However, as with the ALT endpoint, about 50% of the patients relapse six months following cessation of therapy resulting in a durable virologic response of only 12% (23). Studies that have examined 48 weeks of therapy have demonstrated that the sustained virological response is up to 25%.

[0742] Pegylated interferons, i.e., interferons conjugated with polyethylene glycol (PEG), have demonstrated improved characteristics over interferon. Advantages incurred by PEG conjugation can include an improved pharmacokinetic profile compared to interferons lacking PEG, thus imparting more convenient dosing regimes, improved tolerance, and improved antiviral efficacy. Such improvements have been demonstrated in clinical studies of both polyethylene glycol interferon alfa-2a (PEGASYS, Roche) and polyethylene glycol interferon alfa-2b (VIRAFERON PEG, PEG-INTRON, Enzon/Schering Plough).

[0743] siNA molecules in combination with interferons and polyethylene glycol interferons have the potential to improve the effectiveness of treatment of HCV or any of the other indications discussed above. siNA molecules targeting RNAs associated with HCV infection can be used individually or in combination with other therapies such as interferons and polyethylene glycol interferons and to achieve enhanced efficacy.

### Example 15

### Multifunctional siNA Inhibition of Target RNA Expression

[0744] Multifunctional siNA Design

[0745] Once target sites have been identified for multifunctional siNA constructs, each strand of the siNA is designed with a complementary region of length, for example, of about 18 to about 28 nucleotides, that is complementary to a different target nucleic acid sequence. Each complementary region is designed with an adjacent flanking region of about 4 to about 22 nucleotides that is not complementary to the target sequence, but which comprises complementarity to the complementary region of the other sequence (see for example FIG. 16). Hairpin constructs can likewise be designed (see for example FIG. 17). Identification of complementary, palindrome or repeat sequences that are shared between the different target nucleic acid sequences can be used to shorten the overall length of the multifunctional siNA constructs (see for example FIGS. 18 and 19).

[0746] In a non-limiting example, three additional categories of additional multifunctional siNA designs are presented that allow a single siNA molecule to silence multiple targets. The first method utilizes linkers to join siNAs (or multifunctional siNAs) in a direct manner. This can allow the most potent siNAs to be joined without creating a long, continuous stretch of RNA that has potential to trigger an interferon response. The second method is a dendrimeric extension of the overlapping or the linked multifunctional design; or alternatively the organization of siNA in a supramolecular format. The third method uses helix lengths greater than 30 base pairs. Processing of these siNAs by Dicer will reveal new, active 5′ antisense ends. Therefore, the long siNAs can target the sites defined by the original 5′ ends and those defined by the new ends that are created by Dicer processing. When used in combination with traditional multifunctional siNAs (where the sense and antisense strands each define a target) the approach can be used for example to target 4 or more sites.

I. Tethered Bifunctional siNAs

[0747] The basic idea is a novel approach to the design of multifunctional siNAs in which two antisense siNA strands are annealed to a single sense strand. The sense strand oligonucleotide contains a linker (e.g., non-nucleotide linker as described herein) and two segments that anneal to the antisense siNA strands (see FIG. 22). The linkers can also optionally comprise nucleotide-based linkers. Several potential advantages and variations to this approach include, but are not limited to:
[0748] 1. The two antisense siNAs are independent. Therefore, the choice of target sites is not constrained by a requirement for sequence conservation between two sites. Any two highly active siNAs can be combined to form a multifunctional siNA.
[0749] 2. When used in combination with target sites having homology, siNAs that target a sequence present in two genes (e.g., different isoforms), the design can be used to target more than two sites. A single multifunctional siNA can be for example, used to target RNA of two different target RNAs.
[0750] 3. Multifunctional siNAs that use both the sense and antisense strands to target a gene can also be incorporated into a tethered multifuctional design. This leaves open the possibility of targeting 6 or more sites with a single complex.
[0751] 4. It can be possible to anneal more than two antisense strand siNAs to a single tethered sense strand.
[0752] 5. The design avoids long continuous stretches of dsRNA. Therefore, it is less likely to initiate an interferon response.
[0753] 6. The linker (or modifications attached to it, such as conjugates described herein) can improve the pharmacokinetic properties of the complex or improve its incorporation into liposomes. Modifications introduced to the linker should not impact siNA activity to the same extent that they would if directly attached to the siNA (see for example FIGS. 27 and 28).
[0754] 7. The sense strand can extend beyond the annealed antisense strands to provide additional sites for the attachment of conjugates.
[0755] 8. The polarity of the complex can be switched such that both of the antisense 3′ ends are adjacent to the linker and the 5′ ends are distal to the linker or combination thereof.
   Dendrimer and Supramolecular siNAs

[0756] In the dendrimer siNA approach, the synthesis of siNA is initiated by first synthesizing the dendrimer template followed by attaching various functional siNAs. Various constructs are depicted in FIG. 23. The number of functional siNAs that can be attached is only limited by the dimensions of the dendrimer used.

Supramolecular Approach to Multifunctional siNA

[0757] The supramolecular format simplifies the challenges of dendrimer synthesis. In this format, the siNA strands are synthesized by standard RNA chemistry, followed by annealing of various complementary strands. The individual strand synthesis contains an antisense sense sequence of one siNA at the 5′-end followed by a nucleic acid or synthetic linker, such as hexaethyleneglyol, which in turn is followed by sense strand of another siNA in 5′ to 3′ direction. Thus, the synthesis of siNA strands can be carried out in a standard 3′ to 5′ direction. Representative examples of trifunctional and tetrafunctional siNAs are depicted in FIG. 24. Based on a similar principle, higher functionality siNA constructs can be designed as long as efficient annealing of various strands is achieved.

Dicer Enabled Multifunctional siNA

[0758] Using bioinformatic analysis of multiple targets, stretches of identical sequences shared between differing target sequences can be identified ranging from about two to about fourteen nucleotides in length. These identical regions can be designed into extended siNA helixes (e.g., >30 base pairs) such that the processing by Dicer reveals a secondary functional 5′-antisense site (see for example FIG. 25). For example, when the first 17 nucleotides of a siNA antisense strand (e.g., 21 nucleotide strands in a duplex with 3′-TT overhangs) are complementary to a target RNA, robust silencing was observed at 25 nM. 80% silencing was observed with only 16 nucleotide complementarity in the same format.

[0759] Incorporation of this property into the designs of siNAs of about 30 to 40 or more base pairs results in additional multifunctional siNA constructs. The example in FIG. 25 illustrates how a 30 base-pair duplex can target three distinct sequences after processing by Dicer-RNaseIII; these sequences can be on the same mRNA or separate RNAs, such as viral and host factor messages, or multiple points along a given pathway (e.g., inflammatory cascades). Furthermore, a 40 base-pair duplex can combine a bifunctional design in tandem, to provide a single duplex targeting four target sequences. An even more extensive approach can include use of homologous sequences to enable five or six targets silenced for one multifunctional duplex. The example in FIG. 25 demonstrates how this can be achieved. A 30 base pair duplex is cleaved by Dicer into 22 and 8 base pair products from either end (8 b.p. fragments not shown). For ease of presentation the overhangs generated by dicer are not shown—but can be compensated for. Three targeting sequences are shown. The required sequence identity overlapped is indicated by grey boxes. The N's of the parent 30 b.p. siNA are suggested sites of 2′-OH positions to enable Dicer cleavage if this is tested in stabilized chemistries. Note that processing of a 30mer duplex by Dicer RNase III does not give a precise 22+8 cleavage, but rather produces a series of closely related products (with 22+8 being the primary site). Therefore, processing by Dicer will yield a series of active siNAs. Another non-limiting example is shown in FIG. 26. A 40 base pair duplex is cleaved by Dicer into 20 base pair products from either end. For ease of presentation the overhangs generated by dicer are not shown—but can be compensated for. Four targeting sequences are shown in four colors, blue, light-blue and red and orange. The required sequence identity overlapped is indicated by grey boxes. This design format can be extended to larger RNAs. If chemically stabilized siNAs are bound by Dicer, then strategically located ribonucleotide linkages can enable designer cleavage products that permit our more extensive repertoire of multifunctional designs. For example cleavage products not limited to the Dicer standard of approximately 22-nucleotides can allow multifunctional siNA constructs with a target sequence identity overlap ranging from, for example, about 3 to about 15 nucleotides.

### Example 16

### Diagnostic Uses

[0760] The siNA molecules of the invention can be used in a variety of diagnostic applications, such as in the identification of molecular targets (e.g., RNA) in a variety of applications, for example, in clinical, industrial, environmental, agricultural and/or research settings. Such diagnostic use of siNA molecules involves utilizing reconstituted RNAi systems, for example, using cellular lysates or partially purified cellular lysates. siNA molecules of this invention can be used as diagnostic tools to examine genetic drift and mutations within diseased cells or to detect the presence of endogenous or exogenous, for example viral, RNA in a cell. The close relationship between siNA activity and the structure of the target RNA allows the detection of mutations in any region of the molecule, which alters the base-pairing and three-dimensional structure of the target RNA. By using multiple siNA molecules described in this invention, one can map nucleotide changes, which are important to RNA structure and function in vitro, as well as in cells and tissues. Cleavage of target RNAs with siNA molecules can be used to inhibit gene expression and define the role of specified gene products in the progression of disease or infection. In this manner, other genetic targets can be defined as important mediators of the disease. These experiments will lead to better treatment of the disease progression by affording the possibility of combination therapies (e.g., multiple siNA molecules targeted to different genes, siNA molecules coupled with known small molecule inhibitors, or intermittent treatment with combinations siNA molecules and/or other chemical or biological molecules). Other in vitro uses of siNA molecules of this invention are well known in the art, and include detection of the presence of mRNAs associated with a disease, infection, or related condition. Such RNA is detected by determining the presence of a cleavage product after treatment with a siNA using standard methodologies, for example, fluorescence resonance emission transfer (FRET).

[0761] In a specific example, siNA molecules that cleave only wild-type or mutant forms of the target RNA are used for the assay. The first siNA molecules (i.e., those that cleave only wild-type forms of target RNA) are used to identify wild-type RNA present in the sample and the second siNA molecules (i.e., those that cleave only mutant forms of target RNA) are used to identify mutant RNA in the sample. As reaction controls, synthetic substrates of both wild-type and mutant RNA are cleaved by both siNA molecules to demonstrate the relative siNA efficiencies in the reactions and the absence of cleavage of the “non-targeted” RNA species. The cleavage products from the synthetic substrates also serve to generate size markers for the analysis of wild-type and mutant RNAs in the sample population. Thus, each analysis requires two siNA molecules, two substrates and one unknown sample, which is combined into six reactions. The presence of cleavage products is determined using an RNase protection assay so that full-length and cleavage fragments of each RNA can be analyzed in one lane of a polyacrylamide gel. It is not absolutely required to quantify the results to gain insight into the expression of mutant RNAs and putative risk of the desired phenotypic changes in target cells. The expression of mRNA whose protein product is implicated in the development of the phenotype (i.e., disease related or infection related) is adequate to establish risk. If probes of comparable specific activity are used for both transcripts, then a qualitative comparison of RNA levels is adequate and decreases the cost of the initial diagnosis. Higher mutant form to wild-type ratios are correlated with higher risk whether RNA levels are compared qualitatively or quantitatively.

[0762] All patents and publications mentioned in the specification are indicative of the levels of skill of those skilled in the art to which the invention pertains. All references cited in this disclosure are incorporated by reference to the same extent as if each reference had been incorporated by reference in its entirety individually.

[0763] One skilled in the art would readily appreciate that the present invention is well adapted to carry out the objects and obtain the ends and advantages mentioned, as well as those inherent therein. The methods and compositions described herein as presently representative of preferred embodiments are exemplary and are not intended as limitations on the scope of the invention. Changes therein and other uses will occur to those skilled in the art, which are encompassed within the spirit of the invention, are defined by the scope of the claims.

[0764] It will be readily apparent to one skilled in the art that varying substitutions and modifications can be made to the invention disclosed herein without departing from the scope and spirit of the invention. Thus, such additional embodiments are within the scope of the present invention and the following claims. The present invention teaches one skilled in the art to test various combinations and/or substitutions of chemical modifications described herein toward generating nucleic acid constructs with improved activity for mediating RNAi activity. Such improved activity can comprise improved stability, improved bioavailability, and/or improved activation of cellular responses mediating RNAi. Therefore, the specific embodiments described herein are not limiting and one skilled in the art can readily appreciate that specific combinations of the modifications described herein can be tested without undue experimentation toward identifying siNA molecules with improved RNAi activity.

[0765] The invention illustratively described herein suitably can be practiced in the absence of any element or elements, limitation or limitations that are not specifically disclosed herein. Thus, for example, in each instance herein any of the terms “comprising”, “consisting essentially of”, and “consisting of” may be replaced with either of the other two terms. The terms and expressions which have been employed are used as terms of description and not of limitation, and there is no intention that in the use of such terms and expressions of excluding any equivalents of the features shown and described or portions thereof, but it is recognized that various modifications are possible within the scope of the invention claimed. Thus, it should be understood that although the present invention has been specifically disclosed by preferred embodiments, optional features, modification and variation of the concepts herein disclosed may be resorted to by those skilled in the art, and that such modifications and variations are considered to be within the scope of this invention as defined by the description and the appended claims.

[0766] In addition, where features or aspects of the invention are described in terms of Markush groups or other grouping of alternatives, those skilled in the art will recognize that the invention is also thereby described in terms of any individual member or subgroup of members of the Markush group or other group.

TABLE I
HCV Accession Numbers

| Seq Name | Acc# | LOCUS |
|---|---|---|
| gi\|329763\|gb\|M84754.1\|HPCGENANTI | M84754.1 | HPCGENANTI |
| gi\|567059\|gb\|U16362.1\|HCU16362 | U16362.1 | HCU16362 |
| gi\|5918956\|gb\|AF165059.1\|AF165059 | AF165059.1 | AF165059 |
| gi\|385583\|gb\|S62220.1\|S62220 | S62220.1 | S62220 |
| gi\|6010587\|gb\|AF177040.1\|AF177040 | AF177040.1 | AF177040 |
| gi\|5748510\|emb\|AJ238800.1\|HCJ238800 | AJ238800.1 | HCJ238800 |
| gi\|7650221\|gb\|AF207752.1\|AF207752 | AF207752.1 | AF207752 |
| gi\|11559454\|dbj\|AB049094.1\|AB049094 | AB049094.1 | AB049094 |
| gi\|3550760\|dbj\|D84263.1\|D84263 | D84263.1 | D84263 |
| gi\|221610\|dbj\|D90208.1\|HPCJCG | D90208.1 | HPCJCG |
| gi\|558520\|dbj\|D28917.1\|HPCK3A | D28917.1 | HPCK3A |
| gi\|2176577\|dbj\|E08461.1\|E08461 | E08461.1 | E08461 |
| gi\|6707285\|gb\|AF169005.1\|AF169005 | AF169005.1 | AF169005 |
| gi\|12309923\|emb\|AX057094.1\|AX057094 | AX057094.1 | AX057094 |
| gi\|6010585\|gb\|AF177039.1\|AF177039 | AF177039.1 | AF177039 |
| gi\|7329202\|gb\|AF238482.1\|AF238482 | AF238482.1 | AF238482 |
| gi\|11559464\|dbj\|AB049099.1\|AB049099 | AB049099.1 | AB049099 |
| gi\|5918932\|gb\|AF165047.1\|AF165047 | AF165047.1 | AF165047 |
| gi\|5918946\|gb\|AF165054.1\|AF165054 | AF165054.1 | AF165054 |
| gi\|7650233\|gb\|AF207758.1\|AF207758 | AF207758.1 | AF207758 |
| gi\|19568932\|gb\|AF483269.1\| | AF483269.1 | |
| gi\|7650247\|gb\|AF207765.1\|AF207765 | AF207765.1 | AF207765 |
| gi\|12309919\|emb\|AX057086.1\|AX057086 | AX057086.1 | AX057086 |
| gi\|5708597\|dbj\|E10839.1\|E10839 | E10839.1 | E10839 |
| gi\|2327074\|gb\|AF011753.1\|AF011753 | AF011753.1 | AF011753 |
| gi\|12310062\|emb\|AX057317.1\|AX057317 | AX057317.1 | AX057317 |
| gi\|221606\|dbj\|D10750.1\|HPCJ491 | D10750.1 | HPCJ491 |
| gi\|2174448\|dbj\|E06261.1\|E06261 | E06261.1 | E06261 |
| gi\|3098640\|gb\|AF054251.1\|AF054251 | AF054251.1 | AF054251 |
| gi\|18027684\|gb\|AF313916.1\|AF313916 | AF313916.1 | AF313916 |
| gi\|329873\|gb\|M62321.1\|HPCPLYPRE | M62321.1 | HPCPLYPRE |
| gi\|464177\|dbj\|D14853.1\|HPCCGS | D14853.1 | HPCCGS |
| gi\|15422182\|gb\|AY051292.1\| | AY051292.1 | |
| gi\|676877\|dbj\|D49374.1\|HPCFG | D49374.1 | HPCFG |
| gi\|1030706\|dbj\|D50480.1\|HPCK1R1 | D50480.1 | HPCK1R1 |
| gi\|7650223\|gb\|AF207753.1\|AF207753 | AF207753.1 | AF207753 |
| gi\|7650237\|gb\|AF207760.1\|AF207760 | AF207760.1 | AF207760 |
| gi\|11559444\|dbj\|AB049089.1\|AB049089 | AB049089.1 | AB049089 |
| gi\|3550762\|dbj\|D84264.1\|D84264 | D84264.1 | D84264 |
| gi\|12831192\|gb\|AF333324.1\|AF333324 | AF333324.1 | AF333324 |
| gi\|13122265\|dbj\|AB047641.1\|AB047641 | AB047641.1 | AB047641 |
| gi\|7329204\|gb\|AF238483.1\|AF238483 | AF238483.1 | AF238483 |
| gi\|11559468\|dbj\|AB049101.1\|AB049101 | AB049101.1 | AB049101 |
| gi\|5918934\|gb\|AF165048.1\|AF165048 | AF165048.1 | AF165048 |
| gi\|5918948\|gb\|AF165055.1\|AF165055 | AF165055.1 | AF165055 |
| gi\|7650235\|gb\|AF207759.1\|AF207759 | AF207759.1 | AF207759 |
| gi\|7650249\|gb\|AF207766.1\|AF207766 | AF207766.1 | AF207766 |
| gi\|9843676\|emb\|AJ278830.1\|HEC278830 | AJ278830.1 | HEC278830 |
| gi\|11559450\|dbj\|AB049092.1\|AB049092 | AB049092.1 | AB049092 |
| gi\|2943783\|dbj\|D89815.1\|D89815 | D89815.1 | D89815 |
| gi\|9626438\|ref\|NC_001433.1\| | NC_001433.1 | |
| gi\|12310134\|emb\|AX057395.1\|AX057395 | AX057395.1 | AX057395 |
| gi\|11559460\|dbj\|AB049097.1\|AB049097 | AB049097.1 | AB049097 |
| gi\|12309922\|emb\|AX057092.1\|AX057092 | AX057092.1 | AX057092 |
| gi\|2174644\|dbj\|E06457.1\|E06457 | E06457.1 | E06457 |
| gi\|2176559\|dbj\|E08443.1\|E08443 | E08443.1 | E08443 |
| gi\|5918960\|gb\|AF165061.1\|AF165061 | AF165061.1 | AF165061 |
| gi\|2326454\|emb\|Y12083.1\|HCV12083 | Y12083.1 | HCV12083 |
| gi\|5918938\|gb\|AF165050.1\|AF165050 | AF165050.1 | AF165050 |
| gi\|7650225\|gb\|AF207754.1\|AF207754 | AF207754.1 | AF207754 |
| gi\|7650261\|gb\|AF207772.1\|AF207772 | AF207772.1 | AF207772 |
| gi\|1030704\|dbj\|D50485.1\|HPCK1S2 | D50485.1 | HPCK1S2 |
| gi\|3550758\|dbj\|D84262.1\|D84262 | D84262.1 | D84262 |
| gi\|7650239\|gb\|AF207761.1\|AF207761 | AF207761.1 | AF207761 |
| gi\|3550764\|dbj\|D84265.1\|D84265 | D84265.1 | D84265 |
| gi\|7329206\|gb\|AF238484.1\|AF238484 | AF238484.1 | AF238484 |
| gi\|2176516\|dbj\|E08399.1\|E08399 | E08399.1 | E08399 |
| gi\|5918936\|gb\|AF165049.1\|AF165049 | AF165049.1 | AF165049 |
| gi\|11559446\|dbj\|AB049090.1\|AB049090 | AB049090.1 | AB049090 |
| gi\|5441837\|emb\|AJ242653.1\|SSE242653 | AJ242653.1 | SSE242653 |
| gi\|3098641\|gb\|AF054252.1\|AF054252 | AF054252.1 | AF054252 |
| gi\|4753720\|emb\|AJ132997.1\|HCV132997 | AJ132997.1 | HCV132997 |
| gi\|5420376\|emb\|AJ238799.1\|HCJ238799 | AJ238799.1 | HCJ238799 |
| gi\|11559440\|dbj\|AB049087.1\|AB049087 | AB049087.1 | AB049087 |
| gi\|15529110\|gb\|AY045702.1\| | AY045702.1 | |
| gi\|560788\|dbj\|D30613.1\|HPCPP | D30613.1 | HPCPP |
| gi\|11225869\|emb\|AX036253.1\|AX036253 | AX036253.1 | AX036253 |
| gi\|11559456\|dbj\|AB049095.1\|AB049095 | AB049095.1 | AB049095 |
| gi\|329770\|gb\|M58335.1\|HPCHUMR | M58335.1 | HPCHUMR |
| gi\|6707279\|gb\|AF169002.1\|AF169002 | AF169002.1 | AF169002 |
| gi\|221586\|dbj\|D10749.1\|HPCHCJ1 | D10749.1 | HPCHCJ1 |
| gi\|2171981\|dbj\|E03766.1\|E03766 | E03766.1 | E03766 |
| gi\|6010579\|gb\|AF177036.1\|AF177036 | AF177036.1 | AF177036 |
| gi\|1030703\|dbj\|D50484.1\|HPCK1S3 | D50484.1 | HPCK1S3 |
| gi\|3098650\|gb\|AF054257.1\|AF054257 | AF054257.1 | AF054257 |
| gi\|5821154\|dbj\|AB016785.1\|AB016785 | AB016785.1 | AB016785 |
| gi\|5918962\|gb\|AF165062.1\|AF165062 | AF165062.1 | AF165062 |
| gi\|7650227\|gb\|AF207755.1\|AF207755 | AF207755.1 | AF207755 |
| gi\|7650263\|gb\|AF207773.1\|AF207773 | AF207773.1 | AF207773 |
| gi\|1183030\|dbj\|D63822.1\|HPCJK046E2 | D63822.1 | HPCJK046E2 |
| gi\|13122271\|dbj\|AB047644.1\|AB047644 | AB047644.1 | AB047644 |
| gi\|2443428\|gb\|U89019.1\|HCU89019 | U89019.1 | HCU89019 |
| gi\|2462303\|emb\|Y13184.1\|HCV1480 | Y13184.1 | HCV1480 |
| gi\|7329208\|gb\|AF238485.1\|AF238485 | AF238485.1 | AF238485 |
| gi\|1160327\|dbj\|D14484.1\|HPCJRNA | D14484.1 | HPCJRNA |
| gi\|12309921\|emb\|AX057090.1\|AX057090 | AX057090.1 | AX057090 |
| gi\|3098643\|gb\|AF054253.1\|AF054253 | AF054253.1 | AF054253 |
| gi\|21397075\|gb\|AF511948.1\| | AF511948.1 | |
| gi\|1030701\|dbj\|D50482.1\|HPCK1R3 | D50482.1 | HPCK1R3 |
| gi\|1030702\|dbj\|D50483.1\|HPCK1S1 | D50483.1 | HPCK1S1 |
| gi\|3098632\|gb\|AF054247.1\|AF054247 | AF054247.1 | AF054247 |
| gi\|59478\|emb\|X61596.1\|HCVJK1G | X61596.1 | HCVJK1G |
| gi\|3098652\|gb\|AF054258.1\|AF054258 | AF054258.1 | AF054258 |
| gi\|5918950\|gb\|AF165056.1\|AF165056 | AF165056.1 | AF165056 |
| gi\|7650251\|gb\|AF207767.1\|AF207767 | AF207767.1 | AF207767 |
| gi\|5918964\|gb\|AF165063.1\|AF165063 | AF165063.1 | AF165063 |
| gi\|5918928\|gb\|AF165045.1\|AF165045 | AF165045.1 | AF165045 |
| gi\|5532421\|gb\|AF139594.1\|AF139594 | AF139594.1 | AF139594 |
| gi\|13122267\|dbj\|AB047642.1\|AB047642 | AB047642.1 | AB047642 |
| gi\|5441831\|emb\|AJ242651.1\|SSE242651 | AJ242651.1 | SSE242651 |
| gi\|7650265\|gb\|AF207774.1\|AF207774 | AF207774.1 | AF207774 |
| gi\|7650229\|gb\|AF207756.1\|AF207756 | AF207756.1 | AF207756 |
| gi\|1183032\|dbj\|D63821.1\|HPCJK049E1 | D63821.1 | HPCJK049E1 |
| gi\|2175714\|dbj\|E07579.1\|E07579 | E07579.1 | E07579 |
| gi\|1212741\|dbj\|D45172.1\|HPCHCPO | D45172.1 | HPCHCPO |
| gi\|5708511\|dbj\|E05027.1\|E05027 | E05027.1 | E05027 |
| gi\|1483141\|dbj\|D50409.1\|D50409 | D50409.1 | D50409 |
| gi\|13122261\|dbj\|AB047639.1\|AB047639 | AB047639.1 | AB047639 |
| gi\|6521008\|dbj\|AB031663.1\|AB031663 | AB031663.1 | AB031663 |
| gi\|633201\|emb\|X76918.1\|HCVCENS1 | X76918.1 | HCVCENS1 |
| gi\|329737\|gb\|M67463.1\|HPCCGAA | M67463.1 | HPCCGAA |
| gi\|11559452\|dbj\|AB049093.1\|AB049093 | AB049093.1 | AB049093 |
| gi\|13619567\|emb\|AX100563.1\|AX100563 | AX100563.1 | AX100563 |
| gi\|221604\|dbj\|D13558.1\|HPCJ483 | D13558.1 | HPCJ483 |
| gi\|11225872\|emb\|AX036256.1\|AX036256 | AX036256.1 | AX036256 |
| gi\|1749761\|dbj\|D89872.1\|D89872 | D89872.1 | D89872 |
| gi\|5918940\|gb\|AF165051.1\|AF165051 | AF165051.1 | AF165051 |
| gi\|4753718\|emb\|AJ132996.1\|HCV132996 | AJ132996.1 | HCV132996 |
| gi\|7650241\|gb\|AF207762.1\|AF207762 | AF207762.1 | AF207762 |
| gi\|3098645\|gb\|AF054254.1\|AF054254 | AF054254.1 | AF054254 |
| gi\|9930556\|gb\|AF290978.1\|AF290978 | AF290978.1 | AF290978 |
| gi\|11559462\|dbj\|AB049098.1\|AB049098 | AB049098.1 | AB049098 |
| gi\|2764397\|emb\|AJ000009.1\|HCVPOLYP | AJ000009.1 | HCVPOLYP |
| gi\|221608\|dbj\|D10988.1\|HPCJ8G | D10988.1 | HPCJ8G |
| gi\|3098634\|gb\|AF054248.1\|AF054248 | AF054248.1 | AF054248 |
| gi\|221650\|dbj\|D00944.1\|HPCPOLP | D00944.1 | HPCPOLP |
| gi\|306286\|gb\|M96362.1\|HPCUNKCDS | M96362.1 | HPCUNKCDS |
| gi\|3098654\|gb\|AF054259.1\|AF054259 | AF054259.1 | AF054259 |
| gi\|5918952\|gb\|AF165057.1\|AF165057 | AF165057.1 | AF165057 |
| gi\|7650253\|gb\|AF207768.1\|AF207768 | AF207768.1 | AF207768 |
| gi\|5918966\|gb\|AF165064.1\|AF165064 | AF165064.1 | AF165064 |
| gi\|15487693\|gb\|AF356827.1\|AF356827 | AF356827.1 | AF356827 |
| gi\|5738246\|gb\|AF176573.1\|AF176573 | AF176573.1 | AF176573 |
| gi\|11559448\|dbj\|AB049091.1\|AB049091 | AB049091.1 | AB049091 |
| gi\|21397077\|gb\|AF511950.1\| | AF511950.1 | |
| gi\|3098638\|gb\|AF054250.1\|AF054250 | AF054250.1 | AF054250 |
| gi\|6707281\|gb\|AF169003.1\|AF169003 | AF169003.1 | AF169003 |
| gi\|329739\|gb\|L02836.1\|HPCCGENOM | L02836.1 | HPCCGENOM |
| gi\|6010581\|gb\|AF177037.1\|AF177037 | AF177037.1 | AF177037 |
| gi\|11559442\|dbj\|AB049088.1\|AB049088 | AB049088.1 | AB049088 |
| gi\|21397076\|gb\|AF511949.1\| | AF511949.1 | |
| gi\|1030705\|dbj\|D50481.1\|HPCK1R2 | D50481.1 | HPCK1R2 |
| gi\|2176384\|dbj\|E08264.1\|E08264 | E08264.1 | E08264 |
| gi\|3660725\|gb\|AF064490.1\|AF064490 | AF064490.1 | AF064490 |
| gi\|2252489\|emb\|Y11604.1\|HCV4APOLY | Y11604.1 | HCV4APOLY |
| gi\|5918942\|gb\|AF165052.1\|AF165052 | AF165052.1 | AF165052 |
| gi\|2895898\|gb\|AF046866.1\|AF046866 | AF046866.1 | AF046866 |
| gi\|7650243\|gb\|AF207763.1\|AF207763 | AF207763.1 | AF207763 |
| gi\|11559458\|dbj\|AB049096.1\|AB049096 | AB049096.1 | AB049096 |
| gi\|13122263\|dbj\|AB047640.1\|AB047640 | AB047640.1 | AB047640 |
| gi\|5708574\|dbj\|E08263.1\|E08263 | E08263.1 | E08263 |
| gi\|7650257\|gb\|AF207770.1\|AF207770 | AF207770.1 | AF207770 |
| gi\|3098647\|gb\|AF054255.1\|AF054255 | AF054255.1 | AF054255 |
| gi\|11559466\|dbj\|AB049100.1\|AB049100 | AB049100.1 | AB049100 |
| gi\|1181831\|gb\|U45476.1\|HCU45476 | U45476.1 | HCU45476 |
| gi\|2327070\|gb\|AF011751.1\|AF011751 | AF011751.1 | AF011751 |
| gi\|3098636\|gb\|AF054249.1\|AF054249 | AF054249.1 | AF054249 |
| gi\|7329210\|gb\|AF238486.1\|AF238486 | AF238486.1 | AF238486 |
| gi\|221612\|dbj\|D11168.1\|HPCJTA | D11168.1 | HPCJTA |
| gi\|960359\|dbj\|D63857.1\|HPVHCVN | D63857.1 | HPVHCVN |
| gi\|13122273\|dbj\|AB047645.1\|AB047645 | AB047645.1 | AB047645 |
| gi\|5918954\|gb\|AF165058.1\|AF165058 | AF165058.1 | AF165058 |
| gi\|7650255\|gb\|AF207769.1\|AF207769 | AF207769.1 | AF207769 |
| gi\|437107\|gb\|U01214.1\|HCU01214 | U01214.1 | HCU01214 |
| gi\|471116\|dbj\|D10934.1\|HPCRNA | D10934.1 | HPCRNA |
| gi\|13026028\|dbj\|E66593.1\|E66593 | E66593.1 | E66593 |
| gi\|2316097\|gb\|AF009606.1\|AF009606 | AF009606.1 | AF009606 |
| gi\|6707283\|gb\|AF169004.1\|AF169004 | AF169004.1 | AF169004 |
| gi\|514395\|dbj\|D17763.1\|HPCEGS | D17763.1 | HPCEGS |
| gi\|9757541\|dbj\|AB030907.1\|AB030907 | AB030907.1 | AB030907 |
| gi\|7329200\|gb\|AF238481.1\|AF238481 | AF238481.1 | AF238481 |
| gi\|6010583\|gb\|AF177038.1\|AF177038 | AF177038.1 | AF177038 |
| gi\|2172621\|dbj\|E04420.1\|E04420 | E04420.1 | E04420 |
| gi\|8926244\|gb\|AF271632.1\|AF271632 | AF271632.1 | AF271632 |
| gi\|5918930\|gb\|AF165046.1\|AF165046 | AF165046.1 | AF165046 |
| gi\|7650231\|gb\|AF207757.1\|AF207757 | AF207757.1 | AF207757 |
| gi\|5918944\|gb\|AF165053.1\|AF165053 | AF165053.1 | AF165053 |
| gi\|7650245\|gb\|AF207764.1\|AF207764 | AF207764.1 | AF207764 |
| gi\|12309920\|emb\|AX057088.1\|AX057088 | AX057088.1 | AX057088 |
| gi\|5918958\|gb\|AF165060.1\|AF165060 | AF165060.1 | AF165060 |
| gi\|7650259\|gb\|AF207771.1\|AF207771 | AF207771.1 | AF207771 |
| gi\|7341102\|gb\|AF208024.1\|AF208024 | AF208024.1 | AF208024 |
| gi\|3098649\|gb\|AF054256.1\|AF054256 | AF054256.1 | AF054256 |
| gi\|1944375\|dbj\|D85516.1\|D85516 | D85516.1 | D85516 |
| gi\|2327072\|gb\|AF011752.1\|AF011752 | AF011752.1 | AF011752 |
| gi\|221614\|dbj\|D11355.1\|HPCJTB | D11355.1 | HPCJTB |
| gi\|13122269\|dbj\|AB047643.1\|AB047643 | AB047643.1 | AB047643 |

TABLE II
HCV siNA AND TARGET SEQUENCES

| | | | | | |
|---|---|---|---|---|---|
| | Seq | | Seq | | Seq |
| Sequence | ID | Upper seq | ID | Lower seq | ID |

| | | | | | |
|---|---|---|---|---|---|
| GCCCCGGGAGGUCUCGUAG | 1 | GCCCCGGGAGGUCUCGUAG | 1 | CUACGAGACCUCCCGGGGC | 697 |
| UGUGGUACUGCCUGAUAGG | 2 | UGUGGUACUGCCUGAUAGG | 2 | CCUAUCAGGCAGUACCACA | 698 |
| UUGUGGUACUGCCUGAUAG | 3 | UUGUGGUACUGCCUGAUAG | 3 | CUAUCAGGCAGUACCACAA | 699 |
| CCCCGGGAGGUCUCGUAGA | 4 | CCCCGGGAGGUCUCGUAGA | 4 | UCUACGAGACCUCCCGGGG | 700 |
| GUGGUACUGCCUGAUAGGG | 5 | GUGGUACUGCCUGAUAGGG | 5 | CCCUAUCAGGCAGUACCAC | 701 |
| CUGCCUGAUAGGGUGCUUG | 6 | CUGCCUGAUAGGGUGCUUG | 6 | CAAGCACCCUAUCAGGCAG | 702 |
| CCUUGUGGUACUGCCUGAU | 7 | CCUUGUGGUACUGCCUGAU | 7 | AUCAGGCAGUACCACAAGG | 703 |
| GCGAAAGGCCUUGUGGUAC | 8 | GCGAAAGGCCUUGUGGUAC | 8 | GUACCACAAGGCCUUUCGC | 704 |
| UACUGCCUGAUAGGGUGCU | 9 | UACUGCCUGAUAGGGUGCU | 9 | AGCACCCUAUCAGGCAGUA | 705 |
| GGUACUGCCUGAUAGGGUG | 10 | GGUACUGCCUGAUAGGGUG | 10 | CACCCUAUCAGGCAGUACC | 706 |
| AAAGGCCUUGUGGUACUGC | 11 | AAAGGCCUUGUGGUACUGC | 11 | GCAGUACCACAAGGCCUUU | 707 |
| AAGGCCUUGUGGUACUGCC | 12 | kAGGCCUUGUGGUACUGCC | 12 | GGCAGUACCACAAGGCCUU | 708 |
| CUUGUGGUACUGCCUGAUA | 13 | CUUGUGGUACUGCCUGAUA | 13 | UAUCAGGCAGUACCACAAG | 709 |
| AGGCCUUGUGGUACUGCCU | 14 | AGGCCUUGUGGUACUGCCU | 14 | AGGCAGUACCACAAGGCCU | 710 |
| GUACUGCCUGAUAGGGUGC | 15 | GUACUGCCUGAUAGGGUGC | 15 | GCACCCUAUCAGGCAGUAC | 711 |
| ACUGCCUGAUAGGGUGCUU | 16 | ACUGCCUGAUAGGGUGCUU | 16 | AAGCACCCUAUCAGGCAGU | 712 |
| CUUGCGAGUGCCCCGGGAG | 17 | CUUGCGAGUGCCCCGGGAG | 17 | CUCCCGGGGCACUCGCAAG | 713 |
| CUGAUAGGGUGCUUGCGAG | 18 | CUGAUAGGGUGCUUGCGAG | 18 | CUCGCAAGCACCCUAUCAG | 714 |
| UUGCGAGUGCCCCGGGAGG | 19 | UUGCGAGUGCCCCGGGAGG | 19 | CCUCCCGGGGCACUCGCAA | 715 |
| CCUGAUAGGGUGCUUGCGA | 20 | CCUGAUAGGGUGCUUGCGA | 20 | UCGCAAGCACCCUAUCAGG | 716 |
| GGCCUUGUGGUACUGCCUG | 21 | GGCCUUGUGGUACUGCCUG | 21 | CAGGCAGUACCACAAGGCC | 717 |
| GCUUGCGAGUGCCCCGGGA | 22 | GCUUGCGAGUGCCCCGGGA | 22 | UCCCGGGGCACUCGCAAGC | 718 |
| UGCCUGAUAGGGUGCUUGC | 23 | UGCCUGAUAGGGUGCUUGC | 23 | GCAAGCACCCUAUCAGGCA | 719 |
| GAAAGGCCUUGUGGUACUG | 24 | GAAAGGCCUUGUGGUACUG | 24 | CAGUACCACAAGGCCUUUC | 720 |
| GCCUGAUAGGGUGCUUGCG | 25 | GCCUGAUAGGGUGCUUGCG | 25 | CGCAAGCACCCUAUCAGGC | 721 |
| CGAAAGGCCUUGUGGUACU | 26 | CGAAAGGCCUUGUGGUACU | 26 | AGUACCACAAGGCCUUUCG | 722 |
| GCCUUGUGGUACUGCCUGA | 27 | GCCUUGUGGUACUGCCUGA | 27 | UCAGGCAGUACCACAAGGC | 723 |
| GAGUGCCCCGGGAGGUCUC | 28 | GAGUGCCCCGGGAGGUCUC | 28 | GAGACCUCCCGGGGCACUC | 724 |
| CCCGGGAGGUCUCGUAGAC | 29 | CCCGGGAGGUCUCGUAGAC | 29 | GUCUACGAGACCUCCCGGG | 725 |
| UGCGAGUGCCCCGGGAGGU | 30 | UGCGAGUGCCCCGGGAGGU | 30 | ACCUCCCGGGGCACUCGCA | 726 |
| UGGUACUGCCUGAUAGGGU | 31 | UGGUACUGCCUGAUAGGGU | 31 | ACCCUAUCAGGCAGUACCA | 727 |
| CCGGUGAGUACACCGGAAU | 32 | CCGGUGAGUACACCGGAAU | 32 | AUUCCGGUGUACUCACCGG | 728 |
| GCGAGUGCCCCGGGAGGUC | 33 | GCGAGUGCCCCGGGAGGUC | 33 | GACCUCCCGGGGCACUCGC | 729 |
| CGAGUGCCCCGGGAGGUCU | 34 | CGAGUGCCCCGGGAGGUCU | 34 | AGACCUCCCGGGGCACUCG | 730 |
| UGCCCCGGGAGGUCUCGUA | 35 | UGCCCCGGGAGGUCUCGUA | 35 | UACGAGACCUCCCGGGGCA | 731 |
| GUGCCCCGGGAGGUCUCGU | 36 | GUGCCCCGGGAGGUCUCGU | 36 | ACGAGACCUCCCGGGGCAC | 732 |
| AGUGCCCCGGGAGGUCUCG | 37 | AGUGCCCCGGGAGGUCUCG | 37 | CGAGACCUCCCGGGGCACU | 733 |
| CCGGGAGGUCUCGUAGACC | 38 | CCGGGAGGUCUCGUAGACC | 38 | GGUCUACGAGACCUCCCGG | 734 |
| UGAUAGGGUGCUUGCGAGU | 39 | UGAUAGGGUGCUUGCGAGU | 39 | ACUCGCAAGCACCCUAUCA | 735 |
| GUGCUUGCGAGUGCCCCGG | 40 | GUGCUUGCGAGUGCCCCGG | 40 | CCGGGGCACUCGCAAGCAC | 736 |
| AUAGGGUGCUUGCGAGUGC | 41 | AUAGGGUGCUUGCGAGUGC | 41 | GCACUCGCAAGCACCCUAU | 737 |
| GGGUGCUUGCGAGUGCCCC | 42 | GGGUGCUUGCGAGUGCCCC | 42 | GGGGCACUCGCAAGCACCC | 738 |
| CGGGAGGUCUCGUAGACCG | 43 | CGGGAGGUCUCGUAGACCG | 43 | CGGUCUACGAGACCUCCCG | 739 |
| GGGAGGUCUCGUAGACCGU | 44 | GGGAGGUCUCGUAGACCGU | 44 | ACGGUCUACGAGACCUCCC | 740 |
| GAUAGGGUGCUUGCGAGUG | 45 | GAUAGGGUGCUUGCGAGUG | 45 | CACUCGCAAGCACCCUAUC | 741 |
| GGAGGUCUCGUAGACCGUG | 46 | GGAGGUCUCGUAGACCGUG | 46 | CACGGUCUACGAGACCUCC | 742 |
| AGGGUGCUUGCGAGUGCCC | 47 | AGGGUGCUUGCGAGUGCCC | 47 | GGGCACUCGCAAGCACCCU | 743 |
| UGCUUGCGAGUGCCCCGGG | 48 | UGCUUGCGAGUGCCCCGGG | 48 | CCCGGGGCACUCGCAAGCA | 744 |
| GGUGCUUGCGAGUGCCCCG | 49 | GGUGCUUGCGAGUGCCCCG | 49 | CGGGGCACUCGCAAGCACC | 745 |
| UAGGGUGCUUGCGAGUGCC | 50 | UAGGGUGCUUGCGAGUGCC | 50 | GGCACUCGCAAGCACCCUA | 746 |
| AGGUCUCGUAGACCGUGCA | 51 | AGGUCUCGUAGACCGUGCA | 51 | UGCACGGUCUACGAGACCU | 747 |
| GAGGUCUCGUAGACCGUGC | 52 | GAGGUCUCGUAGACCGUGC | 52 | GCACGGUCUACGAGACCUC | 748 |
| GGAACCGGUGAGUACACCG | 53 | GGAACCGGUGAGUACACCG | 53 | CGGUGUACUCACCGGUUCC | 749 |
| CGGAACCGGUGAGUACACC | 54 | CGGAACCGGUGAGUACACC | 54 | GGUGUACUCACCGGUUCCG | 750 |
| CGGUGAGUACACCGGAAUU | 55 | CGGUGAGUACACCGGAAUU | 55 | AAUUCCGGUGUACUCACCG | 751 |
| GCGGAACCGGUGAGUACAC | 56 | GCGGAACCGGUGAGUACAC | 56 | GUGUACUCACCGGUUCCGC | 752 |
| AACCGGUGAGUACACCGGA | 57 | AACCGGUGAGUACACCGGA | 57 | UCCGGUGUACUCACCGGUU | 753 |
| ACCGGUGAGUACACCGGAA | 58 | ACCGGUGAGUACACCGGAA | 58 | UUCCGGUGUACUCACCGGU | 754 |
| CUGCGGAACCGGUGAGUAC | 59 | CUGCGGAACCGGUGAGUAC | 59 | GUACUCACCGGUUCCGCAG | 755 |
| GUCUGCGGAACCGGUGAGU | 60 | GUCUGCGGAACCGGUGAGU | 60 | ACUCACCGGUUCCGCAGAC | 756 |
| GAACCGGUGAGUACACCGG | 61 | GAACCGGUGAGUACACCGG | 61 | CCGGUGUACUCACCGGUUC | 757 |
| UGCGGAACCGGUGAGUACA | 62 | UGCGGAACCGGUGAGUACA | 62 | UGUACUCACCGGUUCCGCA | 758 |
| UCUGCGGAACCGGUGAGUA | 63 | UCUGCGGAACCGGUGAGUA | 63 | UACUCACCGGUUCCGCAGA | 759 |
| GGGAGAGCCAUAGUGGUCU | 64 | GGGAGAGCCAUAGUGGUCU | 64 | AGACCACUAUGGCUCUCCC | 760 |
| GUGGUCUGCGGAACCGGUG | 65 | GUGGUCUGCGGAACCGGUG | 65 | CACCGGUUCCGCAGACCAC | 761 |
| GGUCUGCGGAACCGGUGAG | 66 | GGUCUGCGGAACCGGUGAG | 66 | CUCACCGGUUCCGCAGACC | 762 |
| CGGGAGAGCCAUAGUGGUC | 67 | CGGGAGAGCCAUAGUGGUC | 67 | GACCACUAUGGCUCUCCCG | 763 |
| CCGGGAGAGCCAUAGUGGU | 68 | CCGGGAGAGCCAUAGUGGU | 68 | ACCACUAUGGCUCUCCCGG | 764 |
| UGGUCUGCGGAACCGGUGA | 69 | UGGUCUGCGGAACCGGUGA | 69 | UCACCGGUUCCGCAGACCA | 765 |
| GUGAGUACACCGGAAUUGC | 70 | GUGAGUACACCGGAAUUGC | 70 | GCAAUUCCGGUGUACUCAC | 766 |
| UGAGUACACCGGAAUUGCC | 71 | UGAGUACACCGGAAUUGCC | 71 | GGCAAUUCCGGUGUACUCA | 767 |
| GGUGAGUACACCGGAAUUG | 72 | GGUGAGUACACCGGAAUUG | 72 | CAAUUCCGGUGUACUCACC | 768 |
| GAGCCAUAGUGGUCUGCGG | 73 | GAGCCAUAGUGGUCUGCGG | 73 | CCGCAGACCACUAUGGCUC | 769 |
| AGAGCCAUAGUGGUCUGCG | 74 | AGAGCCAUAGUGGUCUGCG | 74 | CGCAGACCACUAUGGCUCU | 770 |
| UAGUGGUCUGCGGAACCGG | 75 | UAGUGGUCUGCGGAACCGG | 75 | CCGGUUCCGCAGACCACUA | 771 |
| AUAGUGGUCUGCGGAACCG | 76 | AUAGUGGUCUGCGGAACCG | 76 | CGGUUCCGCAGACCACUAU | 772 |
| GAGAGCCAUAGUGGUCUGC | 77 | GAGAGCCAUAGUGGUCUGC | 77 | GCAGACCACUAUGGCUCUC | 773 |
| GCCAUAGUGGUCUGCGGAA | 78 | GCCAUAGUGGUCUGCGGAA | 78 | UUCCGCAGACCACUAUGGC | 774 |
| AGUGGUCUGCGGAACCGGU | 79 | AGUGGUCUGCGGAACCGGU | 79 | ACCGGUUCCGCAGACCACU | 775 |
| CAUAGUGGUCUGCGGAACC | 80 | CAUAGUGGUCUGCGGAACC | 80 | GGUUCCGCAGACCACUAUG | 776 |
| AGCCAUAGUGGUCUGCGGA | 81 | AGCCAUAGUGGUCUGCGGA | 81 | UCCGCAGACCACUAUGGCU | 777 |
| CCAUAGUGGUCUGCGGAAC | 82 | CCAUAGUGGUCUGCGGAAC | 82 | GUUCCGCAGACCACUAUGG | 778 |
| CCCCUCCCGGGAGAGCCAU | 83 | CCCCUCCCGGGAGAGCCAU | 83 | AUGGCUCUCCCGGGAGGGG | 779 |
| GGAGAGCCAUAGUGGUCUG | 84 | GGAGAGCCAUAGUGGUCUG | 84 | CAGACCACUAUGGCUCUCC | 780 |
| CCCGGGAGAGCCAUAGUGG | 85 | CCCGGGAGAGCCAUAGUGG | 85 | CCACUAUGGCUCUCCCGGG | 781 |
| CCCCCUCCCGGGAGAGCCA | 86 | CCCCCUCCCGGGAGAGCCA | 86 | UGGCUCUCCCGGGAGGGGG | 782 |
| UCCCGGGAGAGCCAUAGUG | 87 | UCCCGGGAGAGCCAUAGUG | 87 | CACUAUGGCUCUCCCGGGA | 783 |
| CCCCCCUCCCGGGAGAGCC | 88 | CCCCCCUCCCGGGAGAGCC | 88 | GGCUCUCCCGGGAGGGGGG | 784 |
| CCCUCCCGGGAGAGCCAUA | 89 | CCCUCCCGGGAGAGCCAUA | 89 | UAUGGCUCUCCCGGGAGGG | 785 |
| CCUCCCGGGAGAGCCAUAG | 90 | CCUCCCGGGAGAGCCAUAG | 90 | CUAUGGCUCUCCCGGGAGG | 786 |
| CUCCCGGGAGAGCCAUAGU | 91 | CUCCCGGGAGAGCCAUAGU | 91 | ACUAUGGCUCUCCCGGGAG | 787 |
| UGUUGCCGCGCAGGGGCCC | 92 | UGUUGCCGCGCAGGGGCCC | 92 | GGGCCCCUGCGCGGCAACA | 788 |
| CCCCCCCUCCCGGGAGAGC | 93 | CCCCCCCUCCCGGGAGAGC | 93 | GCUCUCCCGGGAGGGGGGG | 789 |
| CAUGGCGUUAGUAUGAGUG | 94 | CAUGGCGUUAGUAUGAGUG | 94 | CACUCAUACUAACGCCAUG | 790 |
| UAGCCAUGGCGUUAGUAUG | 95 | UAGCCAUGGCGUUAGUAUG | 95 | CAUACUAACGCCAUGGCUA | 791 |
| AGCCAUGGCGUUAGUAUGA | 96 | AGCCAUGGCGUUAGUAUGA | 96 | UCAUACUAACGCCAUGGCU | 792 |
| CCAUGGCGUUAGUAUGAGU | 97 | CCAUGGCGUUAGUAUGAGU | 97 | ACUCAUACUAACGCCAUGG | 793 |
| AUGGCGUUAGUAUGAGUGU | 98 | AUGGCGUUAGUAUGAGUGU | 98 | ACACUCAUACUAACGCCAU | 794 |
| AAGCGUCUAGCCAUGGCGU | 99 | AAGCGUCUAGCCAUGGCGU | 99 | ACGCCAUGGCUAGACGCUU | 795 |
| GUCUAGCCAUGGCGUUAGU | 100 | GUCUAGCCAUGGCGUUAGU | 100 | ACUAACGCCAUGGCUAGAC | 796 |
| AAAGCGUCUAGCCAUGGCG | 101 | AAAGCGUCUAGCCAUGGCG | 101 | CGCCAUGGCUAGACGCUUU | 797 |
| GCGUCUAGCCAUGGCGUUA | 102 | GCGUCUAGCCAUGGCGUUA | 102 | UAACGCCAUGGCUAGACGC | 798 |
| GCCAUGGCGUUAGUAUGAG | 103 | GCCAUGGCGUUAGUAUGAG | 103 | CUCAUACUAACGCCAUGGC | 799 |
| AGCGUCUAGCCAUGGCGUU | 104 | AGCGUCUAGCCAUGGCGUU | 104 | AACGCCAUGGCUAGACGCU | 800 |
| CGUCUAGCCAUGGCGUUAG | 105 | CGUCUAGCCAUGGCGUUAG | 105 | CUAACGCCAUGGCUAGACG | 801 |
| UCUAGCCAUGGCGUUAGUA | 106 | UCUAGCCAUGGCGUUAGUA | 106 | UACUAACGCCAUGGCUAGA | 802 |
| GAAAGCGUCUAGCCAUGGC | 107 | GAAAGCGUCUAGCCAUGGC | 107 | GCCAUGGCUAGACGCUUUC | 803 |
| CUAGCCAUGGCGUUAGUAU | 108 | CUAGCCAUGGCGUUAGUAU | 108 | AUACUAACGCCAUGGCUAG | 804 |
| CACUCCCCUGUGAGGAACU | 109 | CACUCCCCUGUGAGGAACU | 109 | AGUUCCUCACAGGGGAGUG | 805 |
| ACCUCAAAGAAAAACCAAA | 110 | ACCUCAAAGAAAAACCAAA | 110 | UUUGGUUUUUCUUUGAGGU | 806 |
| CGCAGAAAGCGUCUAGCCA | 111 | CGCAGAAAGCGUCUAGCCA | 111 | UGGCUAGACGCUUUCUGCG | 807 |
| GGGUAAGGUCAUCGAUACC | 112 | GGGUAAGGUCAUCGAUACC | 112 | GGUAUCGAUGACCUUACCC | 808 |
| CAGAAAGCGUCUAGCCAUG | 113 | CAGAAAGCGUCUAGCCAUG | 113 | CAUGGCUAGACGCUUUCUG | 809 |
| AAACCUCAAAGAAAAACCA | 114 | AAACCUCAAAGAAAAACCA | 114 | UGGUUUUUCUUUGAGGUUU | 810 |
| GCAGAAAGCGUCUAGCCAU | 115 | GCAGAAAGCGUCUAGCCAU | 115 | AUGGCUAGACGCUUUCUGC | 811 |
| AGAAAGCGUCUAGCCAUGG | 116 | AGAAAGCGUCUAGCCAUGG | 116 | CCAUGGCUAGACGCUUUCU | 812 |
| ACGCAGAAAGCGUCUAGCC | 117 | ACGCAGAAAGCGUCUAGCC | 117 | GGCUAGACGCUUUCUGCGU | 813 |
| AACCUCAAAGAAAAACCAA | 118 | AACCUCAAAGAAAAACCAA | 118 | UUGGUUUUUCUUUGAGGUU | 814 |
| UGGGUAAGGUCAUCGAUAC | 119 | UGGGUAAGGUCAUCGAUAC | 119 | GUAUCGAUGACCUUACCCA | 815 |
| GUAAGGUCAUCGAUACCCU | 120 | GUAAGGUCAUCGAUACCCU | 120 | AGGGUAUCGAUGACCUUAC | 816 |
| UUCACGCAGAAAGCGUCUA | 121 | UUCACGCAGAAAGCGUCUA | 121 | UAGACGCUUUCUGCGUGAA | 817 |
| GGUAAGGUCAUCGAUACCC | 122 | GGUAAGGUCAUCGAUACCC | 122 | GGGUAUCGAUGACCUUACC | 818 |
| AUCACUCCCCUGUGAGGAA | 123 | AUCACUCCCCUGUGAGGAA | 123 | UUCCUCACAGGGGAGUGAU | 819 |
| UCACUCCCCUGUGAGGAAC | 124 | UCACUCCCCUGUGAGGAAC | 124 | GUUCCUCACAGGGGAGUGA | 820 |
| UGUCUUCACGCAGAAAGCG | 125 | UGUCUUCACGCAGAAAGCG | 125 | CGCUUUCUGCGUGAAGACA | 821 |
| UCACGCAGAAAGCGUCUAG | 126 | UCACGCAGAAAGCGUCUAG | 126 | CUAGACGCUUUCUGCGUGA | 822 |
| CACGCAGAAAGCGUCUAGC | 127 | CACGCAGAAAGCGUCUAGC | 127 | GCUAGACGCUUUCUGCGUG | 823 |
| GACCGGGUCCUUUCUUGGA | 128 | GACCGGGUCCUUUCUUGGA | 128 | UCCAAGAAAGGACCCGGUC | 824 |
| GAGGAACUACUGUCUUCAC | 129 | GAGGAACUACUGUCUUCAC | 129 | GUGAAGACAGUAGUUCCUC | 825 |
| CUGUGAGGAACUACUGUCU | 130 | CUGUGAGGAACUACUGUCU | 130 | AGACAGUAGUUCCUCACAG | 826 |
| GGAACUACUGUCUUCACGC | 131 | GGAACUACUGUCUUCACGC | 131 | GCGUGAAGACAGUAGUUCC | 827 |
| ACUCCCCUGUGAGGAACUA | 132 | ACUCCCCUGUGAGGAACUA | 132 | UAGUUCCUCACAGGGGAGU | 828 |
| GUCUUCACGCAGAAAGCGU | 133 | GUCUUCACGCAGAAAGCGU | 133 | ACGCUUUCUGCGUGAAGAC | 829 |
| AGGAACUACUGUCUUCACG | 134 | AGGAACUACUGUCUUCACG | 134 | CGUGAAGACAGUAGUUCCU | 830 |
| CCUGUGAGGAACUACUGUC | 135 | CCUGUGAGGAACUACUGUC | 135 | GACAGUAGUUCCUCACAGG | 831 |
| UGUGAGGAACUACUGUCUU | 136 | UGUGAGGAACUACUGUCUU | 136 | AAGACAGUAGUUCCUCACA | 832 |
| UCUUCACGCAGAAAGCGUC | 137 | UCUUCACGCAGAAAGCGUC | 137 | GACGCUUUCUGCGUGAAGA | 833 |
| GAACUACUGUCUUCACGCA | 138 | GAACUACUGUCUUCACGCA | 138 | UGCGUGAAGACAGUAGUUC | 834 |
| CCCUGUGAGGAACUACUGU | 139 | CCCUGUGAGGAACUACUGU | 139 | ACAGUAGUUCCUCACAGGG | 835 |
| CUUCACGCAGAAAGCGUCU | 140 | CUUCACGCAGAAAGCGUCU | 140 | AGACGCUUUCUGCGUGAAG | 836 |
| UGAGGAACUACUGUCUUCA | 141 | UGAGGAACUACUGUCUUCA | 141 | UGAAGACAGUAGUUCCUCA | 837 |
| UGGCGUUAGUAUGAGUGUC | 142 | UGGCGUUAGUAUGAGUGUC | 142 | GACACUCAUACUAACGCCA | 838 |
| CCCCUGUGAGGAACUACUG | 143 | CCCCUGUGAGGAACUACUG | 143 | CAGUAGUUCCUCACAGGGG | 839 |
| GUGAGGAACUACUGUCUUC | 144 | GUGAGGAACUACUGUCUUC | 144 | GAAGACAGUAGUUCCUCAC | 840 |
| GGCGUUAGUAUGAGUGUCG | 145 | GGCGUUAGUAUGAGUGUCG | 145 | CGACACUCAUACUAACGCC | 841 |
| GCCGAGUAGUGUUGGGUCG | 146 | GCCGAGUAGUGUUGGGUCG | 146 | CGACCCAACACUACUCGGC | 842 |
| ACUGUCUUCACGCAGAAAG | 147 | ACUGUCUUCACGCAGAAAG | 147 | CUUUCUGCGUGAAGACAGU | 843 |
| UGGGUCGCGAAAGGCCUUG | 148 | UGGGUCGCGAAAGGCCUUG | 148 | CAAGGCCUUUCGCGACCCA | 844 |
| CUACUGUCUUCACGCAGAA | 149 | CUACUGUCUUCACGCAGAA | 149 | UUCUGCGUGAAGACAGUAG | 845 |
| CGAGUAGUGUUGGGUCGCG | 150 | CGAGUAGUGUUGGGUCGCG | 150 | CGCGACCCAACACUACUCG | 846 |
| GUAGUGUUGGGUCGCGAAA | 151 | GUAGUGUUGGGUCGCGAAA | 151 | UUUCGCGACCCAACACUAC | 847 |
| UAAACCUCAAAGAAAAACC | 152 | UAAACCUCAAAGAAAAACC | 152 | GGUUUUUCUUUGAGGUUUA | 848 |
| CCGAGUAGUGUUGGGUCGC | 153 | CCGAGUAGUGUUGGGUCGC | 153 | GCGACCCAACACUACUCGG | 849 |
| AGCCGAGUAGUGUUGGGUC | 154 | AGCCGAGUAGUGUUGGGUC | 154 | GACCCAACACUACUCGGCU | 850 |
| GUCGCGAAAGGCCUUGUGG | 155 | GUCGCGAAAGGCCUUGUGG | 155 | CCACAAGGCCUUUCGCGAC | 851 |
| UAGUGUUGGGUCGCGAAAG | 156 | UAGUGUUGGGUCGCGAAAG | 156 | CUUUCGCGACCCAACACUA | 852 |
| CUAGCCGAGUAGUGUUGGG | 157 | CUAGCCGAGUAGUGUUGGG | 157 | CCCAACACUACUCGGCUAG | 853 |
| GAGUAGUGUUGGGUCGCGA | 158 | GAGUAGUGUUGGGUCGCGA | 158 | UCGCGACCCAACACUACUC | 854 |
| UCGCGAAAGGCCUUGUGGU | 159 | UCGCGAAAGGCCUUGUGGU | 159 | ACCACAAGGCCUUUCGCGA | 855 |
| GCGUUAGUAUGAGUGUCGU | 160 | GCGUUAGUAUGAGUGUCGU | 160 | ACGACACUCAUACUAACGC | 856 |
| UAGCCGAGUAGUGUUGGGU | 161 | UAGCCGAGUAGUGUUGGGU | 161 | ACCCAACACUACUCGGCUA | 857 |
| AACUACUGUCUUCACGCAG | 162 | AACUACUGUCUUCACGCAG | 162 | CUGCGUGAAGACAGUAGUU | 858 |
| CGCGAAAGGCCUUGUGGUA | 163 | CGCGAAAGGCCUUGUGGUA | 163 | UACCACAAGGCCUUUCGCG | 859 |
| AGUGUUGGGUCGCGAAAGG | 164 | AGUGUUGGGUCGCGAAAGG | 164 | CCUUUCGCGACCCAACACU | 860 |
| GUUGGGUCGCGAAAGGCCU | 165 | GUUGGGUCGCGAAAGGCCU | 165 | AGGCCUUUCGCGACCCAAC | 861 |
| AGUAGUGUUGGGUCGCGAA | 166 | AGUAGUGUUGGGUCGCGAA | 166 | UUCGCGACCCAACACUACU | 862 |
| UUGGGUCGCGAAAGGCCUU | 167 | UUGGGUCGCGAAAGGCCUU | 167 | kAGGCCUUUCGCGACCCAA | 863 |
| UCCCCUGUGAGGAACUACU | 168 | UCCCCUGUGAGGAACUACU | 168 | AGUAGUUCCUCACAGGGGA | 864 |
| UACUGUCUUCACGCAGAAA | 169 | UACUGUCUUCACGCAGAAA | 169 | UUUCUGCGUGAAGACAGUA | 865 |
| GUGUUGGGUCGCGAAAGGC | 170 | GUGUUGGGUCGCGAAAGGC | 170 | GCCUUUCGCGACCCAACAC | 866 |
| ACUACUGUCUUCACGCAGA | 171 | ACUACUGUCUUCACGCAGA | 171 | UCUGCGUGAAGACAGUAGU | 867 |
| CUGUCUUCACGCAGAAAGC | 172 | CUGUCUUCACGCAGAAAGC | 172 | GCUUUCUGCGUGAAGACAG | 868 |
| GGGUCGCGAAAGGCCUUGU | 173 | GGGUCGCGAAAGGCCUUGU | 173 | ACAAGGCCUUUCGCGACCC | 869 |
| CCUAAACCUCAAAGAAAAA | 174 | CCUAAACCUCAAAGAAAAA | 174 | UUUUUCUUUGAGGUUUAGG | 870 |
| GGUCGCGAAAGGCCUUGUG | 175 | GGUCGCGAAAGGCCUUGUG | 175 | CACAAGGCCUUUCGCGACC | 871 |
| CUAAACCUCAAAGAAAAAC | 176 | CUAAACCUCAAAGAAAAAC | 176 | GUUUUUCUUUGAGGUUUAG | 872 |
| UGUUGGGUCGCGAAAGGCC | 177 | UGUUGGGUCGCGAAAGGCC | 177 | GGCCUUUCGCGACCCAACA | 873 |
| CUCCCCUGUGAGGAACUAC | 178 | CUCCCCUGUGAGGAACUAC | 178 | GUAGUUCCUCACAGGGGAG | 874 |
| UCCUAAACCUCAAAGAAAA | 179 | UCCUAAACCUCAAAGAAAA | 179 | UUUUCUUUGAGGUUUAGGA | 875 |
| ACCGGGUCCUUUCUUGGAU | 180 | ACCGGGUCCUUUCUUGGAU | 180 | AUCCAAGAAAGGACCCGGU | 876 |
| AAUCCUAAACCUCAAAGAA | 181 | AAUCCUAAACCUCAAAGAA | 181 | UUCUUUGAGGUUUAGGAUU | 877 |
| UCAAUGCCUGGAGAUUUGG | 182 | UCAAUGCCUGGAGAUUUGG | 182 | CCAAAUCUCCAGGCAUUGA | 878 |
| AUGCCUGGAGAUUUGGGCG | 183 | AUGCCUGGAGAUUUGGGCG | 183 | CGCCCAAAUCUCCAGGCAU | 879 |
| AAUGCCUGGAGAUUUGGGC | 184 | AAUGCCUGGAGAUUUGGGC | 184 | GCCCAAAUCUCCAGGCAUU | 880 |
| CCGACCUCAUGGGGUACAU | 185 | CCGACCUCAUGGGGUACAU | 185 | AUGUACCCCAUGAGGUCGG | 881 |
| GCUCAAUGCCUGGAGAUUU | 186 | GCUCAAUGCCUGGAGAUUU | 186 | AAAUCUCCAGGCAUUGAGC | 882 |
| CUCAAUGCCUGGAGAUUUG | 187 | CUCAAUGCCUGGAGAUUUG | 187 | CAAAUCUCCAGGCAUUGAG | 883 |
| GCUAGCCGAGUAGUGUUGG | 188 | GCUAGCCGAGUAGUGUUGG | 188 | CCAACACUACUCGGCUAGC | 884 |
| CGCUCAAUGCCUGGAGAUU | 189 | CGCUCAAUGCCUGGAGAUU | 189 | AAUCUCCAGGCAUUGAGCG | 885 |
| CAAUGCCUGGAGAUUUGGG | 190 | CAAUGCCUGGAGAUUUGGG | 190 | CCCAAAUCUCCAGGCAUUG | 886 |
| GCCGACCUCAUGGGGUACA | 191 | GCCGACCUCAUGGGGUACA | 191 | UGUACCCCAUGAGGUCGGC | 887 |
| AUCCUAAACCUCAAAGAAA | 192 | AUCCUAAACCUCAAAGAAA | 192 | UUUCUUUGAGGUUUAGGAU | 888 |
| AGAUUUGGGCGUGCCCCCG | 193 | AGAUUUGGGCGUGCCCCCG | 193 | CGGGGGCACGCCCAAAUCU | 889 |
| CCCGCUCAAUGCCUGGAGA | 194 | CCCGCUCAAUGCCUGGAGA | 194 | UCUCCAGGCAUUGAGCGGG | 890 |
| GAGAUUUGGGCGUGCCCCC | 195 | GAGAUUUGGGCGUGCCCCC | 195 | GGGGGCACGCCCAAAUCUC | 891 |
| GGAGAUUUGGGCGUGCCCC | 196 | GGAGAUUUGGGCGUGCCCC | 196 | GGGGCACGCCCAAAUCUCC | 892 |
| GAUUUGGGCGUGCCCCCGC | 197 | GAUUUGGGCGUGCCCCCGC | 197 | GCGGGGGCACGCCCAAAUC | 893 |
| CCGCUCAAUGCCUGGAGAU | 198 | CCGCUCAAUGCCUGGAGAU | 198 | AUCUCCAGGCAUUGAGCGG | 894 |
| AGUACACCGGAAUUGCCAG | 199 | AGUACACCGGAAUUGCCAG | 199 | CUGGCAAUUCCGGUGUACU | 895 |
| UACACCGGAAUUGCCAGGA | 200 | UACACCGGAAUUGCCAGGA | 200 | UCCUGGCAAUUCCGGUGUA | 896 |
| GAGUACACCGGAAUUGCCA | 201 | GAGUACACCGGAAUUGCCA | 201 | UGGCAAUUCCGGUGUACUC | 897 |
| GUACACCGGAAUUGCCAGG | 202 | GUACACCGGAAUUGCCAGG | 202 | CCUGGCAAUUCCGGUGUAC | 898 |
| UUGCCGCGCAGGGGCCCCA | 203 | UUGCCGCGCAGGGGCCCCA | 203 | UGGGGCCCCUGCGCGGCAA | 899 |
| CUGGAGAUUUGGGCGUGCC | 204 | CUGGAGAUUUGGGCGUGCC | 204 | GGCACGCCCAAAUCUCCAG | 900 |
| GUUGCCGCGCAGGGGCCCC | 205 | GUUGCCGCGCAGGGGCCCC | 205 | GGGGCCCCUGCGCGGCAAC | 901 |
| GCCUGGAGAUUUGGGCGUG | 206 | GCCUGGAGAUUUGGGCGUG | 206 | CACGCCCAAAUCUCCAGGC | 902 |
| UGGAGAUUUGGGCGUGCCC | 207 | UGGAGAUUUGGGCGUGCCC | 207 | GGGCACGCCCAAAUCUCCA | 903 |
| CCUGGAGAUUUGGGCGUGC | 208 | CCUGGAGAUUUGGGCGUGC | 208 | GCACGCCCAAAUCUCCAGG | 904 |
| UGCUAGCCGAGUAGUGUUG | 209 | UGCUAGCCGAGUAGUGUUG | 209 | CAACACUACUCGGCUAGCA | 905 |
| UGCCUGGAGAUUUGGGCGU | 210 | UGCCUGGAGAUUUGGGCGU | 210 | ACGCCCAAAUCUCCAGGCA | 906 |
| CUGCUAGCCGAGUAGUGUU | 211 | CUGCUAGCCGAGUAGUGUU | 211 | AACACUACUCGGCUAGCAG | 907 |
| ACUGCUAGCCGAGUAGUGU | 212 | ACUGCUAGCCGAGUAGUGU | 212 | ACACUACUCGGCUAGCAGU | 908 |
| GACUGCUAGCCGAGUAGUG | 213 | GACUGCUAGCCGAGUAGUG | 213 | CACUACUCGGCUAGCAGUC | 909 |
| AGACUGCUAGCCGAGUAGU | 214 | AGACUGCUAGCCGAGUAGU | 214 | ACUACUCGGCUAGCAGUCU | 910 |
| ACCCGCUCAAUGCCUGGAG | 215 | ACCCGCUCAAUGCCUGGAG | 215 | CUCCAGGCAUUGAGCGGGU | 911 |
| AACCCGCUCAAUGCCUGGA | 216 | AACCCGCUCAAUGCCUGGA | 216 | UCCAGGCAUUGAGCGGGUU | 912 |
| UGCCGCGCAGGGGCCCCAG | 217 | UGCCGCGCAGGGGCCCCAG | 217 | CUGGGGCCCCUGCGCGGCA | 913 |
| AGGGGCCCCAGGUUGGGUG | 218 | AGGGGCCCCAGGUUGGGUG | 218 | CACCCAACCUGGGGCCCCU | 914 |
| GGGCCCCAGGUUGGGUGUG | 219 | GGGCCCCAGGUUGGGUGUG | 219 | CACACCCAACCUGGGGCCC | 915 |
| CAGGGGCCCCAGGUUGGGU | 220 | CAGGGGCCCCAGGUUGGGU | 220 | ACCCAACCUGGGGCCCCUG | 916 |
| GGCCCCAGGUUGGGUGUGC | 221 | GGCCCCAGGUUGGGUGUGC | 221 | GCACACCCAACCUGGGGCC | 917 |
| CGCAGGGGCCCCAGGUUGG | 222 | CGCAGGGGCCCCAGGUUGG | 222 | CCAACCUGGGGCCCCUGCG | 918 |
| UGGGCAGGAUGGCUCCUGU | 223 | UGGGCAGGAUGGCUCCUGU | 223 | ACAGGAGCCAUCCUGCCCA | 919 |
| GCCCCAGGUUGGGUGUGCG | 224 | GCCCCAGGUUGGGUGUGCG | 224 | CGCACACCCAACCUGGGGC | 920 |
| GCAGGGGCCCCAGGUUGGG | 225 | GCAGGGGCCCCAGGUUGGG | 225 | CCCAACCUGGGGCCCCUGC | 921 |
| GGGCAGGAUGGCUCCUGUC | 226 | GGGCAGGAUGGCUCCUGUC | 226 | GACAGGAGCCAUCCUGCCC | 922 |
| GGGGCCCCAGGUUGGGUGU | 227 | GGGGCCCCAGGUUGGGUGU | 227 | ACACCCAACCUGGGGCCCC | 923 |
| GCCGCGCAGGGGCCCCAGG | 228 | GCCGCGCAGGGGCCCCAGG | 228 | CCUGGGGCCCCUGCGCGGC | 924 |
| GCGCAGGGGCCCCAGGUUG | 229 | GCGCAGGGGCCCCAGGUUG | 229 | CAACCUGGGGCCCCUGCGC | 925 |
| CGCGCAGGGGCCCCAGGUU | 230 | CGCGCAGGGGCCCCAGGUU | 230 | AACCUGGGGCCCCUGCGCG | 926 |
| CCGCGCAGGGGCCCCAGGU | 231 | CCGCGCAGGGGCCCCAGGU | 231 | ACCUGGGGCCCCUGCGCGG | 927 |
| AGGACGACCGGGUCCUUUC | 232 | AGGACGACCGGGUCCUUUC | 232 | GAAAGGACCCGGUCGUCCU | 928 |
| CAGGACGACCGGGUCCUUU | 233 | CAGGACGACCGGGUCCUUU | 233 | AAAGGACCCGGUCGUCCUG | 929 |
| UGCCAGGACGACCGGGUCC | 234 | UGCCAGGACGACCGGGUCC | 234 | GGACCCGGUCGUCCUGGCA | 930 |
| AUUGCCAGGACGACCGGGU | 235 | AUUGCCAGGACGACCGGGU | 235 | ACCCGGUCGUCCUGGCAAU | 931 |
| AAUUGCCAGGACGACCGGG | 236 | AAUUGCCAGGACGACCGGG | 236 | CCCGGUCGUCCUGGCAAUU | 932 |
| UUGCCAGGACGACCGGGUC | 237 | UUGCCAGGACGACCGGGUC | 237 | GACCCGGUCGUCCUGGCAA | 933 |
| CCAGGACGACCGGGUCCUU | 238 | CCAGGACGACCGGGUCCUU | 238 | AAGGACCCGGUCGUCCUGG | 934 |
| GCCAGGACGACCGGGUCCU | 239 | GCCAGGACGACCGGGUCCU | 239 | AGGACCCGGUCGUCCUGGC | 935 |
| GAAUUGCCAGGACGACCGG | 240 | GAAUUGCCAGGACGACCGG | 240 | CCGGUCGUCCUGGCAAUUC | 936 |
| ACGACCGGGUCCUUUCUUG | 241 | ACGACCGGGUCCUUUCUUG | 241 | CAAGAAAGGACCCGGUCGU | 937 |
| GACGACCGGGUCCUUUCUU | 242 | GACGACCGGGUCCUUUCUU | 242 | AAGAAAGGACCCGGUCGUC | 938 |
| CGACCGGGUCCUUUCUUGG | 243 | CGACCGGGUCCUUUCUUGG | 243 | CCAAGAAAGGACCCGGUCG | 939 |
| GGACGACCGGGUCCUUUCU | 244 | GGACGACCGGGUCCUUUCU | 244 | AGAAAGGACCCGGUCGUCC | 940 |
| CCGGAAUUGCCAGGACGAC | 245 | CCGGAAUUGCCAGGACGAC | 245 | GUCGUCCUGGCAAUUCCGG | 941 |
| ACACCGGAAUUGCCAGGAC | 246 | ACACCGGAAUUGCCAGGAC | 246 | GUCCUGGCAAUUCCGGUGU | 942 |
| ACCGGAAUUGCCAGGACGA | 247 | ACCGGAAUUGCCAGGACGA | 247 | UCGUCCUGGCAAUUCCGGU | 943 |
| CGGAAUUGCCAGGACGACC | 248 | CGGAAUUGCCAGGACGACC | 248 | GGUCGUCCUGGCAAUUCCG | 944 |
| GGAAUUGCCAGGACGACCG | 249 | GGAAUUGCCAGGACGACCG | 249 | CGGUCGUCCUGGCAAUUCC | 945 |
| CACCGGAAUUGCCAGGACG | 250 | CACCGGAAUUGCCAGGACG | 250 | CGUCCUGGCAAUUCCGGUG | 946 |
| CCCCAGGUUGGGUGUGCGC | 251 | CCCCAGGUUGGGUGUGCGC | 251 | GCGCACACCCAACCUGGGG | 947 |
| GAUCGUUGGUGGAGUUUAC | 252 | GAUCGUUGGUGGAGUUUAC | 252 | GUAAACUCCACCAACGAUC | 948 |
| CAGAUCGUUGGUGGAGUUU | 253 | CAGAUCGUUGGUGGAGUUU | 253 | AAACUCCACCAACGAUCUG | 949 |
| AGAUCGUUGGUGGAGUUUA | 254 | AGAUCGUUGGUGGAGUUUA | 254 | UAAACUCCACCAACGAUCU | 950 |
| CCCAGGUUGGGUGUGCGCG | 255 | CCCAGGUUGGGUGUGCGCG | 255 | CGCGCACACCCAACCUGGG | 951 |
| CCAGGUUGGGUGUGCGCGC | 256 | CCAGGUUGGGUGUGCGCGC | 256 | GCGCGCACACCCAACCUGG | 952 |
| AGGUUGGGUGUGCGCGCGA | 257 | AGGUUGGGUGUGCGCGCGA | 257 | UCGCGCGCACACCCAACCU | 953 |
| CAGGUUGGGUGUGCGCGCG | 258 | CAGGUUGGGUGUGCGCGCG | 258 | CGCGCGCACACCCAACCUG | 954 |
| GGUUGGGUGUGCGCGCGAC | 259 | GGUUGGGUGUGCGCGCGAC | 259 | GUCGCGCGCACACCCAACC | 955 |
| GAAAAACCAAACGUAACAC | 260 | GAAAAACCAAACGUAACAC | 260 | GUGUUACGUUUGGUUUUUC | 956 |
| AGAAAAACCAAACGUAACA | 261 | AGAAAAACCAAACGUAACA | 261 | UGUUACGUUUGGUUUUUCU | 957 |
| AACCAAACGUAACACCAAC | 262 | AACCAAACGUAACACCAAC | 262 | GUUGGUGUUACGUUUGGUU | 958 |
| AAAGAAAAACCAAACGUAA | 263 | AAAGAAAAACCAAACGUAA | 263 | UUACGUUUGGUUUUUCUUU | 959 |
| AAAAACCAAACGUAACACC | 264 | AAAAACCAAACGUAACACC | 264 | GGUGUUACGUUUGGUUUUU | 960 |
| AAGAAAAACCAAACGUAAC | 265 | AAGAAAAACCAAACGUkAC | 265 | GUUACGUUUGGUUUUUCUU | 961 |
| CAAAGAAAAACCAAACGUA | 266 | CAAAGAAAAACCAAACGUA | 266 | UACGUUUGGUUUUUCUUUG | 962 |
| ACCCCCGGCGUAGGUCGCG | 267 | ACCCCCGGCGUAGGUCGCG | 267 | CGCGACCUACGCCGGGGGU | 963 |
| GACCCCCGGCGUAGGUCGC | 268 | GACCCCCGGCGUAGGUCGC | 268 | GCGACCUACGCCGGGGGUC | 964 |
| CGUUAGUAUGAGUGUCGUG | 269 | CGUUAGUAUGAGUGUCGUG | 269 | CACGACACUCAUACUAACG | 965 |
| GUUAGUAUGAGUGUCGUGC | 270 | GUUAGUAUGAGUGUCGUGC | 270 | GCACGACACUCAUACUAAC | 966 |
| UUAGUAUGAGUGUCGUGCA | 271 | UUAGUAUGAGUGUCGUGCA | 271 | UGCACGACACUCAUACUAA | 967 |
| CCAAACGUAACACCAACCG | 272 | CCAAACGUAACACCAACCG | 272 | CGGUUGGUGUUACGUUUGG | 968 |
| ACCAAACGUAACACCAACC | 273 | ACCAAACGUAACACCAACC | 273 | GGUUGGUGUUACGUUUGGU | 969 |
| UUGGGCGUGCCCCCGCGAG | 274 | UUGGGCGUGCCCCCGCGAG | 274 | CUCGCGGGGGCACGCCCAA | 970 |
| AUUUGGGCGUGCCCCCGCG | 275 | AUUUGGGCGUGCCCCCGCG | 275 | CGCGGGGGCACGCCCAAAU | 971 |
| UUUGGGCGUGCCCCCGCGA | 276 | UUUGGGCGUGCCCCCGCGA | 276 | UCGCGGGGGCACGCCCAAA | 972 |
| AAACCAAACGUAACACCAA | 277 | AAACCAAACGUAACACCAA | 277 | UUGGUGUUACGUUUGGUUU | 973 |
| UGGGCGUGCCCCCGCGAGA | 278 | UGGGCGUGCCCCCGCGAGA | 278 | UCUCGCGGGGGCACGCCCA | 974 |
| GUCAGAUCGUUGGUGGAGU | 279 | GUCAGAUCGUUGGUGGAGU | 279 | ACUCCACCAACGAUCUGAC | 975 |
| GUGUCGUGCAGCCUCCAGG | 280 | GUGUCGUGCAGCCUCCAGG | 280 | CCUGGAGGCUGCACGACAC | 976 |
| GGUCAGAUCGUUGGUGGAG | 281 | GGUCAGAUCGUUGGUGGAG | 281 | CUCCACCAACGAUCUGACC | 977 |
| AGUGUCGUGCAGCCUCCAG | 282 | AGUGUCGUGCAGCCUCCAG | 282 | CUGGAGGCUGCACGACACU | 978 |
| GAGUGUCGUGCAGCCUCCA | 283 | GAGUGUCGUGCAGCCUCCA | 283 | UGGAGGCUGCACGACACUC | 979 |
| UCGUAGACCGUGCACCAUG | 284 | UCGUAGACCGUGCACCAUG | 284 | CAUGGUGCACGGUCUACGA | 980 |
| GACCGUGCACCAUGAGCAC | 285 | GACCGUGCACCAUGAGCAC | 285 | GUGCUCAUGGUGCACGGUC | 981 |
| AGUAUGAGUGUCGUGCAGC | 286 | AGUAUGAGUGUCGUGCAGC | 286 | GCUGCACGACACUCAUACU | 982 |
| UAGUAUGAGUGUCGUGCAG | 287 | UAGUAUGAGUGUCGUGCAG | 287 | CUGCACGACACUCAUACUA | 983 |
| UCAGAUCGUUGGUGGAGUU | 288 | UCAGAUCGUUGGUGGAGUU | 288 | AACUCCACCAACGAUCUGA | 984 |
| AGACCGUGCACCAUGAGCA | 289 | AGACCGUGCACCAUGAGCA | 289 | UGCUCAUGGUGCACGGUCU | 985 |
| AAAACCAAACGUAACACCA | 290 | AAAACCAAACGUAACACCA | 290 | UGGUGUUACGUUUGGUUUU | 986 |
| GUAGACCGUGCACCAUGAG | 291 | GUAGACCGUGCACCAUGAG | 291 | CUCAUGGUGCACGGUCUAC | 987 |
| CUCGUAGACCGUGCACCAU | 292 | CUCGUAGACCGUGCACCAU | 292 | AUGGUGCACGGUCUACGAG | 988 |
| CGUAGACCGUGCACCAUGA | 293 | CGUAGACCGUGCACCAUGA | 293 | UCAUGGUGCACGGUCUACG | 989 |
| CCUGGGCUCAGCCCGGGUA | 294 | CCUGGGCUCAGCCCGGGUA | 294 | UACCCGGGCUGAGCCCAGG | 990 |
| UAGACCGUGCACCAUGAGC | 295 | UAGACCGUGCACCAUGAGC | 295 | GCUCAUGGUGCACGGUCUA | 991 |
| GGUCUCGUAGACCGUGCAC | 296 | GGUCUCGUAGACCGUGCAC | 296 | GUGCACGGUCUACGAGACC | 992 |
| UCUCGUAGACCGUGCACCA | 297 | UCUCGUAGACCGUGCACCA | 297 | UGGUGCACGGUCUACGAGA | 993 |
| GUCUCGUAGACCGUGCACC | 298 | GUCUCGUAGACCGUGCACC | 298 | GGUGCACGGUCUACGAGAC | 994 |
| UUGGGUAAGGUCAUCGAUA | 299 | UUGGGUAAGGUCAUCGAUA | 299 | UAUCGAUGACCUUACCCAA | 995 |
| UCGCCGACCUCAUGGGGUA | 300 | UCGCCGACCUCAUGGGGUA | 300 | UACCCCAUGAGGUCGGCGA | 996 |
| CCUCAAAGAAAAACCAAAC | 301 | CCUCAAAGAAAAACCAAAC | 301 | GUUUGGUUUUUCUUUGAGG | 997 |
| GGGCGUGCCCCCGCGAGAC | 302 | GGGCGUGCCCCCGCGAGAC | 302 | GUCUCGCGGGGGCACGCCC | 998 |
| GGAUGAACCGGCUGAUAGC | 303 | GGAUGAACCGGCUGAUAGC | 303 | GCUAUCAGCCGGUUCAUCC | 999 |
| UGGAUGAACCGGCUGAUAG | 304 | UGGAUGAACCGGCUGAUAG | 304 | CUAUCAGCCGGUUCAUCCA | 1000 |
| CUCAAAGAAAAACCAAACG | 305 | CUCAAAGAAAAACCAAACG | 305 | CGUUUGGUUUUUCUUUGAG | 1001 |
| AGGAAGACUUCCGAGCGGU | 306 | AGGAAGACUUCCGAGCGGU | 306 | ACCGCUCGGAAGUCUUCCU | 1002 |
| UCAAAGAAAAACCAAACGU | 307 | UCAAAGAAAAACCAAACGU | 307 | ACGUUUGGUUUUUCUUUGA | 1003 |
| GGAAGACUUCCGAGCGGUC | 308 | GGAAGACUUCCGAGCGGUC | 308 | GACCGCUCGGAAGUCUUCC | 1004 |
| CGCCGACCUCAUGGGGUAC | 309 | CGCCGACCUCAUGGGGUAC | 309 | GUACCCCAUGAGGUCGGCG | 1005 |
| CUUCCGAGCGGUCGCAACC | 310 | CUUCCGAGCGGUCGCAACC | 310 | GGUUGCGACCGCUCGGAAG | 1006 |
| GGCGUGCCCCCGCGAGACU | 311 | GGCGUGCCCCCGCGAGACU | 311 | AGUCUCGCGGGGGCACGCC | 1007 |
| UAUGAGUGUCGUGCAGCCU | 312 | UAUGAGUGUCGUGCAGCCU | 312 | AGGCUGCACGACACUCAUA | 1008 |
| UGCCCCCGCGAGACUGCUA | 313 | UGCCCCCGCGAGACUGCUA | 313 | UAGCAGUCUCGCGGGGGCA | 1009 |
| CGAGACUGCUAGCCGAGUA | 314 | CGAGACUGCUAGCCGAGUA | 314 | UACUCGGCUAGCAGUCUCG | 1010 |
| UGAGUGUCGUGCAGCCUCC | 315 | UGAGUGUCGUGCAGCCUCC | 315 | GGAGGCUGCACGACACUCA | 1011 |
| GCCCCCGCGAGACUGCUAG | 316 | GCCCCCGCGAGACUGCUAG | 316 | CUAGCAGUCUCGCGGGGGC | 1012 |
| GAGACUGCUAGCCGAGUAG | 317 | GAGACUGCUAGCCGAGUAG | 317 | CUACUCGGCUAGCAGUCUC | 1013 |
| CCCCCGCGAGACUGCUAGC | 318 | CCCCCGCGAGACUGCUAGC | 318 | GCUAGCAGUCUCGCGGGGG | 1014 |
| CGCGAGACUGCUAGCCGAG | 319 | CGCGAGACUGCUAGCCGAG | 319 | CUCGGCUAGCAGUCUCGCG | 1015 |
| GUAUGAGUGUCGUGCAGCC | 320 | GUAUGAGUGUCGUGCAGCC | 320 | GGCUGCACGACACUCAUAC | 1016 |
| AUGAGUGUCGUGCAGCCUC | 321 | AUGAGUGUCGUGCAGCCUC | 321 | GAGGCUGCACGACACUCAU | 1017 |
| GCGAGACUGCUAGCCGAGU | 322 | GCGAGACUGCUAGCCGAGU | 322 | ACUCGGCUAGCAGUCUCGC | 1018 |
| CCCCGCGAGACUGCUAGCC | 323 | CCCCGCGAGACUGCUAGCC | 323 | GGCUAGCAGUCUCGCGGGG | 1019 |
| CCGCGAGACUGCUAGCCGA | 324 | CCGCGAGACUGCUAGCCGA | 324 | UCGGCUAGCAGUCUCGCGG | 1020 |
| CCCGCGAGACUGCUAGCCG | 325 | CCCGCGAGACUGCUAGCCG | 325 | CGGCUAGCAGUCUCGCGGG | 1021 |
| GCGUGCCCCCGCGAGACUG | 326 | GCGUGCCCCCGCGAGACUG | 326 | CAGUCUCGCGGGGGCACGC | 1022 |
| GACCCCCCCUCCCGGGAGA | 327 | GACCCCCCCUCCCGGGAGA | 327 | UCUCCCGGGAGGGGGGGUC | 1023 |
| CGGGUCCUUUCUUGGAUCA | 328 | CGGGUCCUUUCUUGGAUCA | 328 | UGAUCCAAGAAAGGACCCG | 1024 |
| GUGCCCCCGCGAGACUGCU | 329 | GUGCCCCCGCGAGACUGCU | 329 | AGCAGUCUCGCGGGGGCAC | 1025 |
| CGUGCCCCCGCGAGACUGC | 330 | CGUGCCCCCGCGAGACUGC | 330 | GCAGUCUCGCGGGGGCACG | 1026 |
| UUCGCCGACCUCAUGGGGU | 331 | UUCGCCGACCUCAUGGGGU | 331 | ACCCCAUGAGGUCGGCGAA | 1027 |
| CGCCCACAGGACGUCAAGU | 332 | CGCCCACAGGACGUCAAGU | 332 | ACUUGACGUCCUGUGGGCG | 1028 |
| GCCCACAGGACGUCAAGUU | 333 | GCCCACAGGACGUCAAGUU | 333 | AACUUGACGUCCUGUGGGC | 1029 |
| ACCCCCCCUCCCGGGAGAG | 334 | ACCCCCCCUCCCGGGAGAG | 334 | CUCUCCCGGGAGGGGGGGU | 1030 |
| GGACCCCCCCUCCCGGGAG | 335 | GGACCCCCCCUCCCGGGAG | 335 | CUCCCGGGAGGGGGGGUCC | 1031 |
| CCGGGUCCUUUCUUGGAUC | 336 | CCGGGUCCUUUCUUGGAUC | 336 | GAUCCAAGAAAGGACCCGG | 1032 |
| CAGGACCCCCCCUCCCGGG | 337 | CAGGACCCCCCCUCCCGGG | 337 | CCCGGGAGGGGGGGUCCUG | 1033 |
| AGGACGUCAAGUUCCCGGG | 338 | AGGACGUCAAGUUCCCGGG | 338 | CCCGGGAACUUGACGUCCU | 1034 |
| AGGACCCCCCCUCCCGGGA | 339 | AGGACCCCCCCUCCCGGGA | 339 | UCCCGGGAGGGGGGGUCCU | 1035 |
| CCACAGGACGUCAAGUUCC | 340 | CCACAGGACGUCAAGUUCC | 340 | GGAACUUGACGUCCUGUGG | 1036 |
| CAGGACGUCAAGUUCCCGG | 341 | CAGGACGUCAAGUUCCCGG | 341 | CCGGGAACUUGACGUCCUG | 1037 |
| ACAGGACGUCAAGUUCCCG | 342 | ACAGGACGUCAAGUUCCCG | 342 | CGGGAACUUGACGUCCUGU | 1038 |
| CACAGGACGUCAAGUUCCC | 343 | CACAGGACGUCAAGUUCCC | 343 | GGGAACUUGACGUCCUGUG | 1039 |
| CAGUGGAUGAACCGGCUGA | 344 | CAGUGGAUGAACCGGCUGA | 344 | UCAGCCGGUUCAUCCACUG | 1040 |
| GGGCUCAGCCCGGGUACCC | 345 | GGGCUCAGCCCGGGUACCC | 345 | GGGUACCCGGGCUGAGCCC | 1041 |
| CCGAGCGGUCGCAACCUCG | 346 | CCGAGCGGUCGCAACCUCG | 346 | CGAGGUUGCGACCGCUCGG | 1042 |
| CUGGGCUCAGCCCGGGUAC | 347 | CUGGGCUCAGCCCGGGUAC | 347 | GUACCCGGGCUGAGCCCAG | 1043 |
| AGUGGAUGAACCGGCUGAU | 348 | AGUGGAUGAACCGGCUGAU | 348 | AUCAGCCGGUUCAUCCACU | 1044 |
| UCCGAGCGGUCGCAACCUC | 349 | UCCGAGCGGUCGCAACCUC | 349 | GAGGUUGCGACCGCUCGGA | 1045 |
| UGGGCUCAGCCCGGGUACC | 350 | UGGGCUCAGCCCGGGUACC | 350 | GGUACCCGGGCUGAGCCCA | 1046 |
| GGUACCCUUGGCCCCUCUA | 351 | GGUACCCUUGGCCCCUCUA | 351 | UAGAGGGGCCAAGGGUACC | 1047 |
| UUCCGAGCGGUCGCAACCU | 352 | UUCCGAGCGGUCGCAACCU | 352 | AGGUUGCGACCGCUCGGAA | 1048 |
| GGGUACCCUUGGCCCCUCU | 353 | GGGUACCCUUGGCCCCUCU | 353 | AGAGGGGCCAAGGGUACCC | 1049 |
| GGGUCCUUUCUUGGAUCAA | 354 | GGGUCCUUUCUUGGAUCAA | 354 | UUGAUCCAAGAAAGGACCC | 1050 |
| CCCACAGGACGUCAAGUUC | 355 | CCCACAGGACGUCAAGUUC | 355 | GAACUUGACGUCCUGUGGG | 1051 |
| GGUUGCUCUUUCUCUAUCU | 356 | GGUUGCUCUUUCUCUAUCU | 356 | AGAUAGAGAAAGAGCAACC | 1052 |
| GUGGGCAGGAUGGCUCCUG | 357 | GUGGGCAGGAUGGCUCCUG | 357 | CAGGAGCCAUCCUGCCCAC | 1053 |
| GGUGGGCAGGAUGGCUCCU | 358 | GGUGGGCAGGAUGGCUCCU | 358 | AGGAGCCAUCCUGCCCACC | 1054 |
| GUUGCUCUUUCUCUAUCUU | 359 | GUUGCUCUUUCUCUAUCUU | 359 | AAGAUAGAGAAAGAGCAAC | 1055 |
| GUGGAUGAACCGGCUGAUA | 360 | GUGGAUGAACCGGCUGAUA | 360 | UAUCAGCCGGUUCAUCCAC | 1056 |
| CCAGGACCCCCCCUCCCGG | 361 | CCAGGACCCCCCCUCCCGG | 361 | CCGGGAGGGGGGGUCCUGG | 1057 |
| GGGUGGGCAGGAUGGCUCC | 362 | GGGUGGGCAGGAUGGCUCC | 362 | GGAGCCAUCCUGCCCACCC | 1058 |
| CUUCACGGAGGCUAUGACU | 363 | CUUCACGGAGGCUAUGACU | 363 | AGUCAUAGCCUCCGUGAAG | 1059 |
| ACCGCCGCCCACAGGACGU | 364 | ACCGCCGCCCACAGGACGU | 364 | ACGUCCUGUGGGCGGCGGU | 1060 |
| UCCAGGACCCCCCCUCCCG | 365 | UCCAGGACCCCCCCUCCCG | 365 | CGGGAGGGGGGGUCCUGGA | 1061 |
| AUAUGAUGAUGAACUGGUC | 366 | AUAUGAUGAUGAACUGGUC | 366 | GACCAGUUCAUCAUCAUAU | 1062 |
| UUCACGGAGGCUAUGACUA | 367 | UUCACGGAGGCUAUGACUA | 367 | UAGUCAUAGCCUCCGUGAA | 1063 |
| UCACGGAGGCUAUGACUAG | 368 | UCACGGAGGCUAUGACUAG | 368 | CUAGUCAUAGCCUCCGUGA | 1064 |
| AUGAACCGGCUGAUAGCGU | 369 | AUGAACCGGCUGAUAGCGU | 369 | ACGCUAUCAGCCGGUUCAU | 1065 |
| GGGAUAUGAUGAUGAACUG | 370 | GGGAUAUGAUGAUGAACUG | 370 | CAGUUCAUCAUCAUAUCCC | 1066 |
| UGCAGUGGAUGAACCGGCU | 371 | UGCAGUGGAUGAACCGGCU | 371 | AGCCGGUUCAUCCACUGCA | 1067 |
| GUGCAGUGGAUGAACCGGC | 372 | GUGCAGUGGAUGAACCGGC | 372 | GCCGGUUCAUCCACUGCAC | 1068 |
| UGAACCGGCUGAUAGCGUU | 373 | UGAACCGGCUGAUAGCGUU | 373 | AACGCUAUCAGCCGGUUCA | 1069 |
| GGAUAUGAUGAUGAACUGG | 374 | GGAUAUGAUGAUGAACUGG | 374 | CCAGUUCAUCAUCAUAUCC | 1070 |
| GCUCUUUCUCUAUCUUCCU | 375 | GCUCUUUCUCUAUCUUCCU | 375 | AGGAAGAUAGAGAAAGAGC | 1071 |
| GGGGGCGACACUCCACCAU | 376 | GGGGGCGACACUCCACCAU | 376 | AUGGUGGAGUGUCGCCCCC | 1072 |
| GAUGAACCGGCUGAUAGCG | 377 | GAUGAACCGGCUGAUAGCG | 377 | CGCUAUCAGCCGGUUCAUC | 1073 |
| GAUAUGAUGAUGAACUGGU | 378 | GAUAUGAUGAUGAACUGGU | 378 | ACCAGUUCAUCAUCAUAUC | 1074 |
| UGGGAUAUGAUGAUGAACU | 379 | UGGGAUAUGAUGAUGAACU | 379 | AGUUCAUCAUCAUAUCCCA | 1075 |
| UUGCUCUUUCUCUAUCUUC | 380 | UUGCUCUUUCUCUAUCUUC | 380 | GAAGAUAGAGAAAGAGCAA | 1076 |
| UGGGGGCGACACUCCACCA | 381 | UGGGGGCGACACUCCACCA | 381 | UGGUGGAGUGUCGCCCCCA | 1077 |
| UGCUCUUUCUCUAUCUUCC | 382 | UGCUCUUUCUCUAUCUUCC | 382 | GGAAGAUAGAGAAAGAGCA | 1078 |
| GGUCCUUUCUUGGAUCAAC | 383 | GGUCCUUUCUUGGAUCAAC | 383 | GUUGAUCCAAGAAAGGACC | 1079 |
| AAGACUUCCGAGCGGUCGC | 384 | AAGACUUCCGAGCGGUCGC | 384 | GCGACCGCUCGGAAGUCUU | 1080 |
| AGCCCGGGUACCCUUGGCC | 385 | AGCCCGGGUACCCUUGGCC | 385 | GGCCAAGGGUACCCGGGCU | 1081 |
| UUUCUUGGAUCAACCCGCU | 386 | UUUCUUGGAUCAACCCGCU | 386 | AGCGGGUUGAUCCAAGAAA | 1082 |
| CAGCCCGGGUACCCUUGGC | 387 | CAGCCCGGGUACCCUUGGC | 387 | GCCAAGGGUACCCGGGCUG | 1083 |
| AGACUUCCGAGCGGUCGCA | 388 | AGACUUCCGAGCGGUCGCA | 388 | UGCGACCGCUCGGAAGUCU | 1084 |
| UUCUUGGAUCAACCCGCUC | 389 | UUCUUGGAUCAACCCGCUC | 389 | GAGCGGGUUGAUCCAAGAA | 1085 |
| CCCGGGUACCCUUGGCCCC | 390 | CCCGGGUACCCUUGGCCCC | 390 | GGGGCCAAGGGUACCCGGG | 1086 |
| GUCCUUUCUUGGAUCAACC | 391 | GUCCUUUCUUGGAUCAACC | 391 | GGUUGAUCCAAGAAAGGAC | 1087 |
| CUUUCUUGGAUCAACCCGC | 392 | CUUUCUUGGAUCAACCCGC | 392 | GCGGGUUGAUCCAAGAAAG | 1088 |
| CCUUUCUUGGAUCAACCCG | 393 | CCUUUCUUGGAUCAACCCG | 393 | CGGGUUGAUCCAAGAAAGG | 1089 |
| UCCUUUCUUGGAUCAACCC | 394 | UCCUUUCUUGGAUCAACCC | 394 | GGGUUGAUCCAAGAAAGGA | 1090 |
| AAGUUCCCGGGCGGUGGUC | 395 | AAGUUCCCGGGCGGUGGUC | 395 | GACCACCGCCCGGGAACUU | 1091 |
| GCAGUGGAUGAACCGGCUG | 396 | GCAGUGGAUGAACCGGCUG | 396 | CAGCCGGUUCAUCCACUGC | 1092 |
| CCGGGUACCCUUGGCCCCU | 397 | CCGGGUACCCUUGGCCCCU | 397 | AGGGGCCAAGGGUACCCGG | 1093 |
| AGUUCCCGGGCGGUGGUCA | 398 | AGUUCCCGGGCGGUGGUCA | 398 | UGACCACCGCCCGGGAACU | 1094 |
| CUUGGAUCAACCCGCUCAA | 399 | CUUGGAUCAACCCGCUCAA | 399 | UUGAGCGGGUUGAUCCAAG | 1095 |
| GGAUCAACCCGCUCAAUGC | 400 | GGAUCAACCCGCUCAAUGC | 400 | GCAUUGAGCGGGUUGAUCC | 1096 |
| ACUUCCGAGCGGUCGCAAC | 401 | ACUUCCGAGCGGUCGCAAC | 401 | GUUGCGACCGCUCGGAAGU | 1097 |
| UCUUGGAUCAACCCGCUCA | 402 | UCUUGGAUCAACCCGCUCA | 402 | UGAGCGGGUUGAUCCAAGA | 1098 |
| UUGGAUCAACCCGCUCAAU | 403 | UUGGAUCAACCCGCUCAAU | 403 | AUUGAGCGGGUUGAUCCAA | 1099 |
| AACCGCCGCCCACAGGACG | 404 | AACCGCCGCCCACAGGACG | 404 | CGUCCUGUGGGCGGCGGUU | 1100 |
| GCGUGAACUAUGCAACAGG | 405 | GCGUGAACUAUGCAACAGG | 405 | CCUGUUGCAUAGUUCACGC | 1101 |
| AUCAACCCGCUCAAUGCCU | 406 | AUCAACCCGCUCAAUGCCU | 406 | AGGCAUUGAGCGGGUUGAU | 1102 |
| GAUCAACCCGCUCAAUGCC | 407 | GAUCAACCCGCUCAAUGCC | 407 | GGCAUUGAGCGGGUUGAUC | 1103 |
| CAACCCGCUCAAUGCCUGG | 408 | CAACCCGCUCAAUGCCUGG | 408 | CCAGGCAUUGAGCGGGUUG | 1104 |
| GCUUCGCCGACCUCAUGGG | 409 | GCUUCGCCGACCUCAUGGG | 409 | CCCAUGAGGUCGGCGAAGC | 1105 |
| GACUUCCGAGCGGUCGCAA | 410 | GACUUCCGAGCGGUCGCAA | 410 | UUGCGACCGCUCGGAAGUC | 1106 |
| UCAACCCGCUCAAUGCCUG | 411 | UCAACCCGCUCAAUGCCUG | 411 | CAGGCAUUGAGCGGGUUGA | 1107 |
| GGCUUCGCCGACCUCAUGG | 412 | GGCUUCGCCGACCUCAUGG | 412 | CCAUGAGGUCGGCGAAGCC | 1108 |
| UGGAUCAACCCGCUCAAUG | 413 | UGGAUCAACCCGCUCAAUG | 413 | CAUUGAGCGGGUUGAUCCA | 1109 |
| CGGGCGGUGGUCAGAUCGU | 414 | CGGGCGGUGGUCAGAUCGU | 414 | ACGAUCUGACCACCGCCCG | 1110 |
| CUUGGCCCCUCUAUGGCAA | 415 | CUUGGCCCCUCUAUGGCAA | 415 | UUGCCAUAGAGGGGCCAAG | 1111 |
| CCGGGCGGUGGUCAGAUCG | 416 | CCGGGCGGUGGUCAGAUCG | 416 | CGAUCUGACCACCGCCCGG | 1112 |
| UGGGGUGGGCAGGAUGGCU | 417 | UGGGGUGGGCAGGAUGGCU | 417 | AGCCAUCCUGCCCACCCCA | 1113 |
| GGAGUUUACCUGUUGCCGC | 418 | GGAGUUUACCUGUUGCCGC | 418 | GCGGCAACAGGUAAACUCC | 1114 |
| CCUUGGCCCCUCUAUGGCA | 419 | CCUUGGCCCCUCUAUGGCA | 419 | UGCCAUAGAGGGGCCAAGG | 1115 |
| GUGGAGUUUACCUGUUGCC | 420 | GUGGAGUUUACCUGUUGCC | 420 | GGCAACAGGUAAACUCCAC | 1116 |
| GGUGGAGUUUACCUGUUGC | 421 | GGUGGAGUUUACCUGUUGC | 421 | GCAACAGGUAAACUCCACC | 1117 |
| UUCCCGGGCGGUGGUCAGA | 422 | UUCCCGGGCGGUGGUCAGA | 422 | UCUGACCACCGCCCGGGAA | 1118 |
| UGAACUAUGCAACAGGGAA | 423 | UGAACUAUGCAACAGGGAA | 423 | UUCCCUGUUGCAUAGUUCA | 1119 |
| AGUUUACCUGUUGCCGCGC | 424 | AGUUUACCUGUUGCCGCGC | 424 | GCGCGGCAACAGGUAAACU | 1120 |
| GUGAACUAUGCAACAGGGA | 425 | GUGAACUAUGCAACAGGGA | 425 | UCCCUGUUGCAUAGUUCAC | 1121 |
| UUACCUGUUGCCGCGCAGG | 426 | UUACCUGUUGCCGCGCAGG | 426 | CCUGCGCGGCAACAGGUAA | 1122 |
| UCCCGGGCGGUGGUCAGAU | 427 | UCCCGGGCGGUGGUCAGAU | 427 | AUCUGACCACCGCCCGGGA | 1123 |
| GUUCCCGGGCGGUGGUCAG | 428 | GUUCCCGGGCGGUGGUCAG | 428 | CUGACCACCGCCCGGGAAC | 1124 |
| GCCCGGGUACCCUUGGCCC | 429 | GCCCGGGUACCCUUGGCCC | 429 | GGGCCAAGGGUACCCGGGC | 1125 |
| AAGGAGAUGAAGGCGAAGG | 430 | AAGGAGAUGAAGGCGAAGG | 430 | CCUUCGCCUUCAUCUCCUU | 1126 |
| AGGAGAUGAAGGCGAAGGC | 431 | AGGAGAUGAAGGCGAAGGC | 431 | GCCUUCGCCUUCAUCUCCU | 1127 |
| GUUUACCUGUUGCCGCGCA | 432 | GUUUACCUGUUGCCGCGCA | 432 | UGCGCGGCAACAGGUAAAC | 1128 |
| CUGUUGCCGCGCAGGGGCC | 433 | CUGUUGCCGCGCAGGGGCC | 433 | GGCCCCUGCGCGGCAACAG | 1129 |
| AACACCAACCGCCGCCCAC | 434 | AACACCAACCGCCGCCCAC | 434 | GUGGGCGGCGGUUGGUGUU | 1130 |
| GAGUUUACCUGUUGCCGCG | 435 | GAGUUUACCUGUUGCCGCG | 435 | CGCGGCAACAGGUAAACUC | 1131 |
| UUUACCUGUUGCCGCGCAG | 436 | UUUACCUGUUGCCGCGCAG | 436 | CUGCGCGGCAACAGGUAAA | 1132 |
| GGGGUGGGCAGGAUGGCUC | 437 | GGGGUGGGCAGGAUGGCUC | 437 | GAGCCAUCCUGCCCACCCC | 1133 |
| GAAGACUUCCGAGCGGUCG | 438 | GAAGACUUCCGAGCGGUCG | 438 | CGACCGCUCGGAAGUCUUC | 1134 |
| ACCUGUUGCCGCGCAGGGG | 439 | ACCUGUUGCCGCGCAGGGG | 439 | CCCCUGCGCGGCAACAGGU | 1135 |
| UACCUGUUGCCGCGCAGGG | 440 | UACCUGUUGCCGCGCAGGG | 440 | CCCUGCGCGGCAACAGGUA | 1136 |
| UACCUCUUCAACUGGGCAG | 441 | UACCUCUUCAACUGGGCAG | 441 | CUGCCCAGUUGAAGAGGUA | 1137 |
| CGUGAACUAUGCAACAGGG | 442 | CGUGAACUAUGCAACAGGG | 442 | CCCUGUUGCAUAGUUCACG | 1i38 |
| ACACCAACCGCCGCCCACA | 443 | ACACCAACCGCCGCCCACA | 443 | UGUGGGCGGCGGUUGGUGU | 1139 |
| CCCGGGCGGUGGUCAGAUC | 444 | CCCGGGCGGUGGUCAGAUC | 444 | GAUCUGACCACCGCCCGGG | 1140 |
| ACCUCUUCAACUGGGCAGU | 445 | ACCUCUUCAACUGGGCAGU | 445 | ACUGCCCAGUUGAAGAGGU | 1141 |
| CUUCGCCGACCUCAUGGGG | 446 | CUUCGCCGACCUCAUGGGG | 446 | CCCCAUGAGGUCGGCGAAG | 1142 |
| CCUGUUGCCGCGCAGGGGC | 447 | CCUGUUGCCGCGCAGGGGC | 447 | GCCCCUGCGCGGCAACAGG | 1143 |
| CCAACCGCCGCCCACAGGA | 448 | CCAACCGCCGCCCACAGGA | 448 | UCCUGUGGGCGGCGGUUGG | 1144 |
| ACCAACCGCCGCCCACAGG | 449 | ACCAACCGCCGCCCACAGG | 449 | CCUGUGGGCGGCGGUUGGU | 1145 |
| UGGAGUUUACCUGUUGCCG | 450 | UGGAGUUUACCUGUUGCCG | 450 | CGGCAACAGGUAAACUCCA | 1146 |
| CACCAACCGCCGCCCACAG | 451 | CACCAACCGCCGCCCACAG | 451 | CUGUGGGCGGCGGUUGGUG | 1147 |
| CAAACGUAACACCAACCGC | 452 | CAAACGUAACACCAACCGC | 452 | GCGGUUGGUGUUACGUUUG | 1148 |
| CAAGCGGAGACGGCUGGAG | 453 | CXAGCGGAGACGGCUGGAG | 453 | CUCCAGCCGUCUCCGCUUG | 1149 |
| ACGGAGGCUAUGACUAGGU | 454 | ACGGAGGCUAUGACUAGGU | 454 | ACCUAGUCAUAGCCUCCGU | 1150 |
| UAACACCAACCGCCGCCCA | 455 | UAACACCAACCGCCGCCCA | 455 | UGGGCGGCGGUUGGUGUUA | 1151 |
| AUCGUUGGUGGAGUUUACC | 456 | AUCGUUGGUGGAGUUUACC | 456 | GGUAAACUCCACCAACGAU | 1152 |
| GGGAGACAUAUAUCACAGC | 457 | GGGAGACAUAUAUCACAGC | 457 | GCUGUGAUAUAUGUCUCCC | 1153 |
| AACCUCGUGGAAGGCGACA | 458 | AACCUCGUGGAAGGCGACA | 458 | UGUCGCCUUCCACGAGGUU | 1154 |
| GGGGGAGACAUAUAUCACA | 459 | GGGGGAGACAUAUAUCACA | 459 | UGUGAUAUAUGUCUCCCCC | 1155 |
| AACGUAACACCAACCGCCG | 460 | AACGUAACACCAACCGCCG | 460 | CGGCGGUUGGUGUUACGUU | 1156 |
| AAACGUAACACCAACCGCC | 461 | AAACGUAACACCAACCGCC | 461 | GGCGGUUGGUGUUACGUUU | 1157 |
| GGGGAGACAUAUAUCACAG | 462 | GGGGAGACAUAUAUCACAG | 462 | CUGUGAUAUAUGUCUCCCC | 1158 |
| GAGAUGAAGGCGAAGGCGU | 463 | GAGAUGAAGGCGAAGGCGU | 463 | ACGCCUUCGCCUUCAUCUC | 1159 |
| AAGCGGAGACGGCUGGAGC | 464 | AAGCGGAGACGGCUGGAGC | 464 | GCUCCAGCCGUCUCCGCUU | 1160 |
| GUACCCUUGGCCCCUCUAU | 465 | GUACCCUUGGCCCCUCUAU | 465 | AUAGAGGGGCCAAGGGUAC | 1161 |
| CCUCCAGGACCCCCCCUCC | 466 | CCUCCAGGACCCCCCCUCC | 466 | GGAGGGGGGGUCCUGGAGG | 1162 |
| CUCCAGGACCCCCCCUCCC | 467 | CUCCAGGACCCCCCCUCCC | 467 | GGGAGGGGGGGUCCUGGAG | 1163 |
| UACCCUUGGCCCCUCUAUG | 468 | UACCCUUGGCCCCUCUAUG | 468 | CAUAGAGGGGCCAAGGGUA | 1164 |
| CAACCUCGUGGAAGGCGAC | 469 | CAACCUCGUGGAAGGCGAC | 469 | GUCGCCUUCCACGAGGUUG | 1165 |
| CGGAGGCUAUGACUAGGUA | 470 | CGGAGGCUAUGACUAGGUA | 470 | UACCUAGUCAUAGCCUCCG | 1166 |
| GGAGAUGAAGGCGAAGGCG | 471 | GGAGAUGAAGGCGAAGGCG | 471 | CGCCUUCGCCUUCAUCUCC | 1167 |
| AGAUGAAGGCGAAGGCGUC | 472 | AGAUGAAGGCGAAGGCGUC | 472 | GACGCCUUCGCCUUCAUCU | 1168 |
| GUAACACCAACCGCCGCCC | 473 | GUAACACCAACCGCCGCCC | 473 | GGGCGGCGGUUGGUGUUAC | 1169 |
| CGUAACACCAACCGCCGCC | 474 | CGUAACACCAACCGCCGCC | 474 | GGCGGCGGUUGGUGUUACG | 1170 |
| ACGUAACACCAACCGCCGC | 475 | ACGUAACACCAACCGCCGC | 475 | GCGGCGGUUGGUGUUACGU | 1171 |
| CACGGAGGCUAUGACUAGG | 476 | CACGGAGGCUAUGACUAGG | 476 | CCUAGUCAUAGCCUCCGUG | 1172 |
| GUUGGUGGAGUUUACCUGU | 477 | GUUGGUGGAGUUUACCUGU | 477 | ACAGGUAAACUCCACCAAC | 1173 |
| CGUUGGUGGAGUUUACCUG | 478 | CGUUGGUGGAGUUUACCUG | 478 | CAGGUAAACUCCACCAACG | 1174 |
| ACCCUUGGCCCCUCUAUGG | 479 | ACCCUUGGCCCCUCUAUGG | 479 | CCAUAGAGGGGCCAAGGGU | 1175 |
| UUGGUGGAGUUUACCUGUU | 480 | UUGGUGGAGUUUACCUGUU | 480 | AACAGGUAAACUCCACCAA | 1176 |
| UGGUGGAGUUUACCUGUUG | 481 | UGGUGGAGUUUACCUGUUG | 481 | CAACAGGUAAACUCCACCA | 1177 |
| UCGUUGGUGGAGUUUACCU | 482 | UCGUUGGUGGAGUUUACCU | 482 | AGGUAAACUCCACCAACGA | 1178 |
| CGGGUACCCUUGGCCCCUC | 483 | CGGGUACCCUUGGCCCCUC | 483 | GAGGGGCCAAGGGUACCCG | 1179 |
| GGCUCAGCCCGGGUACCCU | 484 | GGCUCAGCCCGGGUACCCU | 484 | AGGGUACCCGGGCUGAGCC | 1180 |
| GAUCACUCCCCUGUGAGGA | 485 | GAUCACUCCCCUGUGAGGA | 485 | UCCUCACAGGGGAGUGAUC | 1181 |
| GGUGGUCAGAUCGUUGGUG | 486 | GGUGGUCAGAUCGUUGGUG | 486 | CACCAACGAUCUGACCACC | 1182 |
| GAUGAAGGCGAAGGCGUCC | 487 | GAUGAAGGCGAAGGCGUCC | 487 | GGACGCCUUCGCCUUCAUC | 1183 |
| AGGAUGGCUCCUGUCACCC | 488 | AGGAUGGCUCCUGUCACCC | 488 | GGGUGACAGGAGCCAUCCU | 1184 |
| CUCAGCCCGGGUACCCUUG | 489 | CUCAGCCCGGGUACCCUUG | 489 | CAAGGGUACCCGGGCUGAG | 1185 |
| UCAGCCCGGGUACCCUUGG | 490 | UCAGCCCGGGUACCCUUGG | 490 | CCAAGGGUACCCGGGCUGA | 1186 |
| AUGAAGGCGAAGGCGUCCA | 491 | AUGAAGGCGAAGGCGUCCA | 491 | UGGACGCCUUCGCCUUCAU | 1187 |
| CGGGGGAGACAUAUAUCAC | 492 | CGGGGGAGACAUAUAUCAC | 492 | GUGAUAUAUGUCUCCCCCG | 1188 |
| CAGGAUGGCUCCUGUCACC | 493 | CAGGAUGGCUCCUGUCACC | 493 | GGUGACAGGAGCCAUCCUG | 1189 |
| UGAAGGCGAAGGCGUCCAC | 494 | UGAAGGCGAAGGCGUCCAC | 494 | GUGGACGCCUUCGCCUUCA | 1190 |
| UGGUCAGAUCGUUGGUGGA | 495 | UGGUCAGAUCGUUGGUGGA | 495 | UCCACCAACGAUCUGACCA | 1191 |
| GCUCAGCCCGGGUACCCUU | 498 | GCUCAGCCCGGGUACCCUU | 496 | AAGGGUACCCGGGCUGAGC | 1192 |
| GUGGUCAGAUCGUUGGUGG | 497 | GUGGUCAGAUCGUUGGUGG | 497 | CCACCAACGAUCUGACCAC | 1193 |
| CAGCCUCCAGGACCCCCCC | 498 | CAGCCUCCAGGACCCCCCC | 498 | GGGGGGGUCCUGGAGGCUG | 1194 |
| GGCGGUGGUCAGAUCGUUG | 499 | GGCGGUGGUCAGAUCGUUG | 499 | CAACGAUCUGACCACCGCC | 1195 |
| GCCUCCAGGACCCCCCCUC | 500 | GCCUCCAGGACCCCCCCUC | 500 | GAGGGGGGGUCCUGGAGGC | 1196 |
| AACCGGCUGAUAGCGUUCG | 501 | AACCGGCUGAUAGCGUUCG | 501 | CGAACGCUAUCAGCCGGUU | 1197 |
| AGCCUCCAGGACCCCCCCU | 502 | AGCCUCCAGGACCCCCCCU | 502 | AGGGGGGGUCCUGGAGGCU | 1198 |
| CGGCUUCGCCGACCUCAUG | 503 | CGGCUUCGCCGACCUCAUG | 503 | CAUGAGGUCGGCGAAGCCG | 1199 |
| GCGGAGACGGCUGGAGCGC | 504 | GCGGAGACGGCUGGAGCGC | 504 | GCGCUCCAGCCGUCUCCGC | 1200 |
| UCAUGGGGUACAUUCCGCU | 505 | UCAUGGGGUACAUUCCGCU | 505 | AGCGGAAUGUACCCCAUGA | 1201 |
| GAACCGGCUGAUAGCGUUC | 506 | GAACCGGCUGAUAGCGUUC | 506 | GAACGCUAUCAGCCGGUUC | 1202 |
| GCGGUGGUCAGAUCGUUGG | 507 | GCGGUGGUCAGAUCGUUGG | 507 | CCAACGAUCUGACCACCGC | 1203 |
| GGCAGGAUGGCUCCUGUCA | 508 | GGCAGGAUGGCUCCUGUCA | 508 | UGACAGGAGCCAUCCUGCC | 1204 |
| GCAGGAUGGCUCCUGUCAC | 509 | GCAGGAUGGCUCCUGUCAC | 509 | GUGACAGGAGCCAUCCUGC | 1205 |
| AUUUGGGUAAGGUCAUCGA | 510 | AUUUGGGUAAGGUCAUCGA | 510 | UCGAUGACCUUACCCAAAU | 1206 |
| ACCGGCUGAUAGCGUUCGC | 511 | ACCGGCUGAUAGCGUUCGC | 511 | GCGAACGCUAUCAGCCGGU | 1207 |
| CGGAGACGGCUGGAGCGCG | 512 | CGGAGACGGCUGGAGCGCG | 512 | CGCGCUCCAGCCGUCUCCG | 1208 |
| GCGGCUUCGCCGACCUCAU | 513 | GCGGCUUCGCCGACCUCAU | 513 | AUGAGGUCGGCGAAGCCGC | 1209 |
| AAUUUGGGUAAGGUCAUCG | 514 | AAUUUGGGUAAGGUCAUCG | 514 | CGAUGACCUUACCCAAAUU | 1210 |
| GGGCGGUGGUCAGAUCGUU | 515 | GGGCGGUGGUCAGAUCGUU | 515 | AACGAUCUGACCACCGCCC | 1211 |
| CAACCGCCGCCCACAGGAC | 516 | CAACCGCCGCCCACAGGAC | 516 | GUCCUGUGGGCGGCGGUUG | 1212 |
| UGCGGCUUCGCCGACCUCA | 517 | UGCGGCUUCGCCGACCUCA | 517 | UGAGGUCGGCGAAGCCGCA | 1213 |
| CGGUGGUCAGAUCGUUGGU | 518 | CGGUGGUCAGAUCGUUGGU | 518 | ACCAACGAUCUGACCACCG | 1214 |
| UUGGGUGUGCGCGCGACUA | 519 | UUGGGUGUGCGCGCGACUA | 519 | UAGUCGCGCGCACACCCAA | 1215 |
| GUGUGCGCGCGACUAGGAA | 520 | GUGUGCGCGCGACUAGGAA | 520 | UUCCUAGUCGCGCGCACAC | 1216 |
| GAUGGCUCCUGUCACCCCG | 521 | GAUGGCUCCUGUCACCCCG | 521 | CGGGGUGACAGGAGCCAUC | 1217 |
| GGAUGGCUCCUGUCACCCC | 522 | GGAUGGCUCCUGUCACCCC | 522 | GGGGUGACAGGAGCCAUCC | 1218 |
| UGUGCGCGCGACUAGGAAG | 523 | UGUGCGCGCGACUAGGAAG | 523 | CUUCCUAGUCGCGCGCACA | 1219 |
| UGGGUGUGCGCGCGACUAG | 524 | UGGGUGUGCGCGCGACUAG | 524 | CUAGUCGCGCGCACACCCA | 1220 |
| GGUGUGCGCGCGACUAGGA | 525 | GGUGUGCGCGCGACUAGGA | 525 | UCCUAGUCGCGCGCACACC | 1221 |
| GGGUGUGCGCGCGACUAGG | 526 | GGGUGUGCGCGCGACUAGG | 526 | CCUAGUCGCGCGCACACCC | 1222 |
| CCCCGGCGUAGGUCGCGUA | 527 | CCCCGGCGUAGGUCGCGUA | 527 | UACGCGACCUACGCCGGGG | 1223 |
| GAAGGCGACAACCUAUCCC | 528 | GAAGGCGACAACCUAUCCC | 528 | GGGAUAGGUUGUCGCCUUC | 1224 |
| CCCGGCGUAGGUCGCGUAA | 529 | CCCGGCGUAGGUCGCGUAA | 529 | UUACGCGACCUACGCCGGG | 1225 |
| AGCGGAGACGGCUGGAGCG | 530 | AGCGGAGACGGCUGGAGCG | 530 | CGCUCCAGCCGUCUCCGCU | 1226 |
| CCCCCGGCGUAGGUCGCGU | 531 | CCCCCGGCGUAGGUCGCGU | 531 | ACGCGACCUACGCCGGGGG | 1227 |
| AGGCGAAGGCGUCCACAGU | 532 | AGGCGAAGGCGUCCACAGU | 532 | ACUGUGGACGCCUUCGCCU | 1228 |
| AAGGCGAAGGCGUCCACAG | 533 | AAGGCGAAGGCGUCCACAG | 533 | CUGUGGACGCCUUCGCCUU | 1229 |
| GUUGGGUGUGCGCGCGACU | 534 | GUUGGGUGUGCGCGCGACU | 534 | AGUCGCGCGCACACCCAAC | 1230 |
| CUCAUGGGGUACAUUCCGC | 535 | CUCAUGGGGUACAUUCCGC | 535 | GCGGAAUGUACCCCAUGAG | 1231 |
| GGAAGGCGACAACCUAUCC | 536 | GGAAGGCGACAACCUAUCC | 536 | GGAUAGGUUGUCGCCUUCC | 1232 |
| GCAAGUUCCUUGCCGACGG | 537 | GCAAGUUCCUUGCCGACGG | 537 | CCGUCGGCAAGGAACUUGC | 1233 |
| UGCAGCCUCCAGGACCCCC | 538 | UGCAGCCUCCAGGACCCCC | 538 | GGGGGUCCUGGAGGCUGCA | 1234 |
| GGACUGCACGAUGCUCGUG | 539 | GGACUGCACGAUGCUCGUG | 539 | CACGAGCAUCGUGCAGUCC | 1235 |
| GAAGGCGAAGGCGUCCACA | 540 | GAAGGCGAAGGCGUCCACA | 540 | UGUGGACGCCUUCGCCUUC | 1236 |
| GCAACCUCGUGGAAGGCGA | 541 | GCAACCUCGUGGAAGGCGA | 541 | UCGCCUUCCACGAGGUUGC | 1237 |
| GACGCGGGCUGUGCUUGGU | 542 | GACGCGGGCUGUGCUUGGU | 542 | ACCAAGCACAGCCCGCGUC | 1238 |
| ACGCGGGCUGUGCUUGGUA | 543 | ACGCGGGCUGUGCUUGGUA | 543 | UACCAAGCACAGCCCGCGU | 1239 |
| GUGCAGCCUCCAGGACCCC | 544 | GUGCAGCCUCCAGGACCCC | 544 | GGGGUCCUGGAGGCUGCAC | 1240 |
| GCAGCCUCCAGGACCCCCC | 545 | GCAGCCUCCAGGACCCCCC | 545 | GGGGGGUCCUGGAGGCUGC | 1241 |
| CGCAACCUCGUGGAAGGCG | 546 | CGCAACCUCGUGGAAGGCG | 546 | CGCCUUCCACGAGGUUGCG | 1242 |
| UGUCGUGCAGCCUCCAGGA | 547 | UGUCGUGCAGCCUCCAGGA | 547 | UCCUGGAGGCUGCACGACA | 1243 |
| AUGGCUUGGGAUAUGAUGA | 548 | AUGGCUUGGGAUAUGAUGA | 548 | UCAUCAUAUCCCAAGCCAU | 1244 |
| CUUGGGAUAUGAUGAUGAA | 549 | CUUGGGAUAUGAUGAUGAA | 549 | UUCAUCAUCAUAUCCCAAG | 1245 |
| CCCUUGGCCCCUCUAUGGC | 550 | CCCUUGGCCCCUCUAUGGC | 550 | GCCAUAGAGGGGCCAAGGG | 1246 |
| UGGCUUGGGAUAUGAUGAU | 551 | UGGCUUGGGAUAUGAUGAU | 551 | AUCAUCAUAUCCCAAGCCA | 1247 |
| CUGUGCAGUGGAUGAACCG | 552 | CUGUGCAGUGGAUGAACCG | 552 | CGGUUCAUCCACUGCACAG | 1248 |
| AUGACGCGGGCUGUGCUUG | 553 | AUGACGCGGGCUGUGCUUG | 553 | CAAGCACAGCCCGCGUCAU | 1249 |
| GCUUGGGAUAUGAUGAUGA | 554 | GCUUGGGAUAUGAUGAUGA | 554 | UCAUCAUCAUAUCCCAAGC | 1250 |
| UAUGACGCGGGCUGUGCUU | 555 | UAUGACGCGGGCUGUGCUU | 555 | AAGCACAGCCCGCGUCAUA | 1251 |
| UGACGCGGGCUGUGCUUGG | 556 | UGACGCGGGCUGUGCUUGG | 556 | CCAAGCACAGCCCGCGUCA | 1252 |
| GGCUUGGGAUAUGAUGAUG | 557 | GGCUUGGGAUAUGAUGAUG | 557 | CAUCAUCAUAUCCCAAGCC | 1253 |
| UGUGCAGUGGAUGAACCGG | 558 | UGUGCAGUGGAUGAACCGG | 558 | CCGGUUCAUCCACUGCACA | 1254 |
| GCUGUGCAGUGGAUGAACC | 559 | GCUGUGCAGUGGAUGAACC | 559 | GGUUCAUCCACUGCACAGC | 1255 |
| CUCUUCAACUGGGCAGUAA | 560 | CUCUUCAACUGGGCAGUAA | 560 | UUACUGCCCAGUUGAAGAG | 1256 |
| CCUCGUGGAAGGCGACAAC | 561 | CCUCGUGGAAGGCGACAAC | 561 | GUUGUCGCCUUCCACGAGG | 1257 |
| UGUGUCACCCAGACAGUCG | 562 | UGUGUCACCCAGACAGUCG | 562 | CGACUGUCUGGGUGACACA | 1258 |
| GGCGUGAACUAUGCAACAG | 563 | GGCGUGAACUAUGCAACAG | 563 | CUGUUGCAUAGUUCACGCC | 1259 |
| CGGCGUGAACUAUGCAACA | 564 | CGGCGUGAACUAUGCAACA | 564 | UGUUGCAUAGUUCACGCCG | 1260 |
| GUGUCACCCAGACAGUCGA | 565 | GUGUCACCCAGACAGUCGA | 565 | UCGACUGUCUGGGUGACAC | 1261 |
| CCUCUUCAACUGGGCAGUA | 566 | CCUCUUCAACUGGGCAGUA | 566 | UACUGCCCAGUUGAAGAGG | 1262 |
| CGUGGAAGGCGACAACCUA | 567 | CGUGGAAGGCGACAACCUA | 567 | UAGGUUGUCGCCUUCCACG | 1263 |
| UCGUGGAAGGCGACAACCU | 568 | UCGUGGAAGGCGACAACCU | 568 | AGGUUGUCGCCUUCCACGA | 264 |
| CGGCCUAGUUGGGGCCCCA | 569 | CGGCCUAGUUGGGGCCCCA | 569 | UGGGGCCCCAACUAGGCCG | 1265 |
| CGACUAGGAAGACUUCCGA | 570 | CGACUAGGAAGACUUCCGA | 570 | UCGGAAGUCUUCCUAGUCG | 1266 |
| UUUGGGUAAGGUCAUCGAU | 571 | UUUGGGUAAGGUCAUCGAU | 571 | AUCGAUGACCUUACCCAAA | 1267 |
| GUGGAAGGCGACAACCUAU | 572 | GUGGAAGGCGACAACCUAU | 572 | AUAGGUUGUCGCCUUCCAC | 1268 |
| ACCUCGUGGAAGGCGACAA | 573 | ACCUCGUGGAAGGCGACAA | 573 | UUGUCGCCUUCCACGAGGU | 1269 |
| GCGACUAGGAAGACUUCCG | 574 | GCGACUAGGAAGACUUCCG | 574 | CGGAAGUCUUCCUAGUCGC | 1270 |
| GUCGUGCAGCCUCCAGGAC | 575 | GUCGUGCAGCCUCCAGGAC | 575 | GUCCUGGAGGCUGCACGAC | 1271 |
| UAGGAAGACUUCCGAGCGG | 576 | UAGGAAGACUUCCGAGCGG | 576 | CCGCUCGGAAGUCUUCCUA | 1272 |
| ACGGCGUGAACUAUGCAAC | 577 | ACGGCGUGAACUAUGCAAC | 577 | GUUGCAUAGUUCACGCCGU | 1273 |
| CUCGUGGAAGGCGACAACC | 578 | CUCGUGGAAGGCGACAACC | 578 | GGUUGUCGCCUUCCACGAG | 1274 |
| GGUCGCAACCUCGUGGAAG | 579 | GGUCGCAACCUCGUGGAAG | 579 | CUUCCACGAGGUUGCGACC | 1275 |
| CGGUCGCAACCUCGUGGAA | 580 | CGGUCGCAACCUCGUGGAA | 580 | UUCCACGAGGUUGCGACCG | 1276 |
| GCGCGCGACUAGGAAGACU | 581 | GCGCGCGACUAGGAAGACU | 581 | AGUCUUCCUAGUCGCGCGC | 1277 |
| GACGGCGUGAACUAUGCAA | 582 | GACGGCGUGAACUAUGCAA | 582 | UUGCAUAGUUCACGCCGUC | 1278 |
| UAGAUCACUCCCCUGUGAG | 583 | UAGAUCACUCCCCUGUGAG | 583 | CUCACAGGGGAGUGAUCUA | 1279 |
| AGCGGUCGCAACCUCGUGG | 584 | AGCGGUCGCAACCUCGUGG | 584 | CCACGAGGUUGCGACCGCU | 1280 |
| UGGAAGGCGACAACCUAUC | 585 | UGGAAGGCGACAACCUAUC | 585 | GAUAGGUUGUCGCCUUCCA | 1281 |
| CGCGCGACUAGGAAGACUU | 586 | CGCGCGACUAGGAAGACUU | 586 | AAGUCUUCCUAGUCGCGCG | 1282 |
| CUAGGAAGACUUCCGAGCG | 587 | CUAGGAAGACUUCCGAGCG | 587 | CGCUCGGAAGUCUUCCUAG | 1283 |
| GUGCGCGCGACUAGGAAGA | 588 | GUGCGCGCGACUAGGAAGA | 588 | UCUUCCUAGUCGCGCGCAC | 1284 |
| AGAUCACUCCCCUGUGAGG | 589 | AGAUCACUCCCCUGUGAGG | 589 | CCUCACAGGGGAGUGAUCU | 1285 |
| UGCGCGCGACUAGGAAGAC | 590 | UGCGCGCGACUAGGAAGAC | 590 | GUCUUCCUAGUCGCGCGCA | 1286 |
| AUAGAUCACUCCCCUGUGA | 591 | AUAGAUCACUCCCCUGUGA | 591 | UCACAGGGGAGUGAUCUAU | 1287 |
| GAGCGGUCGCAACCUCGUG | 592 | GAGCGGUCGCAACCUCGUG | 592 | CACGAGGUUGCGACCGCUC | 1288 |
| CACGAACGACUGCUCCAAC | 593 | CACGAACGACUGCUCCAAC | 593 | GUUGGAGCAGUCGUUCGUG | 1289 |
| GGCAAGUUCCUUGCCGACG | 594 | GGCAAGUUCCUUGCCGACG | 594 | CGUCGGCAAGGAACUUGCC | 1290 |
| UCGUGCAGCCUCCAGGACC | 595 | UCGUGCAGCCUCCAGGACC | 595 | GGUCCUGGAGGCUGCACGA | 1291 |
| GUCACGAACGACUGCUCCA | 596 | GUCACGAACGACUGCUCCA | 596 | UGGAGCAGUCGUUCGUGAC | 1292 |
| GCGGUCGCAACCUCGUGGA | 597 | GCGGUCGCAACCUCGUGGA | 597 | UCCACGAGGUUGCGACCGC | 1293 |
| GCGCGACUAGGAAGACUUC | 598 | GCGCGACUAGGAAGACUUC | 598 | GAAGUCUUCCUAGUCGCGC | 1294 |
| GCUAUGACGCGGGCUGUGC | 599 | GCUAUGACGCGGGCUGUGC | 599 | GCACAGCCCGCGUCAUAGC | 1295 |
| UCACGAACGACUGCUCCAA | 600 | UCACGAACGACUGCUCCAA | 600 | UUGGAGCAGUCGUUCGUGA | 1296 |
| UCGCAACCUCGUGGAAGGC | 601 | UCGCAACCUCGUGGAAGGC | 601 | GCCUUCCACGAGGUUGCGA | 1297 |
| CGUGCAGCCUCCAGGACCC | 602 | CGUGCAGCCUCCAGGACCC | 602 | GGGUCCUGGAGGCUGCACG | 1298 |
| GUCGCAACCUCGUGGAAGG | 603 | GUCGCAACCUCGUGGAAGG | 603 | CCUUCCACGAGGUUGCGAC | 1299 |
| ACUAGGAAGACUUCCGAGC | 604 | ACUAGGAAGACUUCCGAGC | 604 | GCUCGGAAGUCUUCCUAGU | 1300 |
| CGCGACUAGGAAGACUUCC | 605 | CGCGACUAGGAAGACUUCC | 605 | GGAAGUCUUCCUAGUCGCG | 1301 |
| UGGGCGAAGCACAUGUGGA | 606 | UGGGCGAAGCACAUGUGGA | 606 | UCCACAUGUGCUUCGCCCA | 1302 |
| CCUUGCCUACUAUUCCAUG | 607 | CCUUGCCUACUAUUCCAUG | 607 | CAUGGAAUAGUAGGCAAGG | 1303 |
| GCCUCAGGAAACUUGGGGU | 608 | GCCUCAGGAAACUUGGGGU | 608 | ACCCCAAGUUUCCUGAGGC | 1304 |
| UGCUAUGACGCGGGCUGUG | 609 | UGCUAUGACGCGGGCUGUG | 609 | CACAGCCCGCGUCAUAGCA | 1305 |
| UCGUGCUCGCCACCGCUAC | 610 | UCGUGCUCGCCACCGCUAC | 610 | GUAGCGGUGGCGAGCACGA | 1306 |
| UGCCUCAGGAAACUUGGGG | 611 | UGCCUCAGGAAACUUGGGG | 611 | CCCCAAGUUUCCUGAGGCA | 1307 |
| UGUCUCGUGCCCGACCCCG | 612 | UGUCUCGUGCCCGACCCCG | 612 | CGGGGUCGGGCACGAGACA | 1308 |
| UGUGGCGGCAGGAGAUGGG | 613 | UGUGGCGGCAGGAGAUGGG | 613 | CCCAUCUCCUGCCGCCACA | 1309 |
| GUCGUGCUCGCCACCGCUA | 614 | GUCGUGCUCGCCACCGCUA | 614 | UAGCGGUGGCGAGCACGAC | 1310 |
| GAUUUCCACUACGUGACGG | 615 | GAUUUCCACUACGUGACGG | 615 | CCGUCACGUAGUGGAAAUC | 1311 |
| GGGCCUUGCCUACUAUUCC | 616 | GGGCCUUGCCUACUAUUCC | 616 | GGAAUAGUAGGCAAGGCCC | 1312 |
| GCCUUGCCUACUAUUCCAU | 617 | GCCUUGCCUACUAUUCCAU | 617 | AUGGAAUAGUAGGCAAGGC | 1313 |
| GACUAGGAAGACUUCCGAG | 618 | GACUAGGAAGACUUCCGAG | 618 | CUCGGAAGUCUUCCUAGUC | 1314 |
| GCGGGGGAGACAUAUAUCA | 619 | GCGGGGGAGACAUAUAUCA | 619 | UGAUAUAUGUCUCCCCCGC | 1315 |
| CGAGCGGUCGCAACCUCGU | 620 | CGAGCGGUCGCAACCUCGU | 620 | ACGAGGUUGCGACCGCUCG | 1316 |
| GGCCUUGCCUACUAUUCCA | 621 | GGCCUUGCCUACUAUUCCA | 621 | UGGAAUAGUAGGCAAGGCC | 1317 |
| AUUUCCACUACGUGACGGG | 622 | AUUUCCACUACGUGACGGG | 622 | CCCGUCACGUAGUGGAAAU | 1318 |
| GGACGUCAAGUUCCCGGGC | 623 | GGACGUCAAGUUCCCGGGC | 623 | GCCCGGGAACUUGACGUCC | 1319 |
| GAGUGCUAUGACGCGGGCU | 624 | GAGUGCUAUGACGCGGGCU | 624 | AGCCCGCGUCAUAGCACUC | 1320 |
| GACGUCAAGUUCCCGGGCG | 625 | GACGUCAAGUUCCCGGGCG | 625 | CGCCCGGGAACUUGACGUC | 1321 |
| UCAGCGACGGGUCUUGGUC | 626 | UCAGCGACGGGUCUUGGUC | 626 | GACCAAGACCCGUCGCUGA | 1322 |
| UCAAGUUCCCGGGCGGUGG | 627 | UCAAGUUCCCGGGCGGUGG | 627 | CCACCGCCCGGGAACUUGA | 1323 |
| UCAAGGAGAUGAAGGCGAA | 628 | UCAAGGAGAUGAAGGCGAA | 628 | UUCGCCUUCAUCUCCUUGA | 1324 |
| CCUAUCCCCAAGGCUCGCC | 629 | CCUAUCCCCAAGGCUCGCC | 629 | GGCGAGCCUUGGGGAUAGG | 1325 |
| CUUGACCUACCUCAGAUCA | 630 | CUUGACCUACCUCAGAUCA | 630 | UGAUCUGAGGUAGGUCAAG | 1326 |
| UUUCCACUACGUGACGGGC | 631 | UUUCCACUACGUGACGGGC | 631 | GCCCGUCACGUAGUGGAAA | 1327 |
| AGUGCUAUGACGCGGGCUG | 632 | AGUGCUAUGACGCGGGCUG | 632 | CAGCCCGCGUCAUAGCACU | 1328 |
| ACGUCAAGUUCCCGGGCGG | 633 | ACGUCAAGUUCCCGGGCGG | 633 | CCGCCCGGGAACUUGACGU | 1329 |
| UCUGGAGACAUCGGGCCAG | 634 | UCUGGAGACAUCGGGCCAG | 634 | CUGGCCCGAUGUCUCCAGA | 1330 |
| GGGCGAAGCACAUGUGGAA | 635 | GGGCGAAGCACAUGUGGAA | 635 | UUCCACAUGUGCUUCGCCC | 1331 |
| UUGACCUACCUCAGAUCAU | 636 | UUGACCUACCUCAGAUCAU | 636 | AUGAUCUGAGGUAGGUCAA | 1332 |
| CCAAGCGGAGACGGCUGGA | 637 | CCAAGCGGAGACGGCUGGA | 637 | UCCAGCCGUCUCCGCUUGG | 1333 |
| ACCAAGCGGAGACGGCUGG | 638 | ACCAAGCGGAGACGGCUGG | 638 | CCAGCCGUCUCCGCUUGGU | 1334 |
| GGGUGGCUUCAUGCCUCAG | 639 | GGGUGGCUUCAUGCCUCAG | 639 | CUGAGGCAUGAAGCCACCC | 1335 |
| GUCAAGUUCCCGGGCGGUG | 640 | GUCAAGUUCCCGGGCGGUG | 640 | CACCGCCCGGGAACUUGAC | 1336 |
| CUCAAGGAGAUGAAGGCGA | 641 | CUCAAGGAGAUGAAGGCGA | 641 | UCGCCUUCAUCUCCUUGAG | 1337 |
| GACCAAGCGGAGACGGCUG | 642 | GACCAAGCGGAGACGGCUG | 642 | CAGCCGUCUCCGCUUGGUC | 1338 |
| UCCAGGUCGGGCUCAACCA | 643 | UCCAGGUCGGGCUCAACCA | 643 | UGGUUGAGCCCGACCUGGA | 1339 |
| CUCUUUCUCUAUCUUCCUC | 644 | CUCUUUCUCUAUCUUCCUC | 644 | GAGGAAGAUAGAGAAAGAG | 1340 |
| GUCUGGAGACAUCGGGCCA | 645 | GUCUGGAGACAUCGGGCCA | 645 | UGGCCCGAUGUCUCCAGAC | 1341 |
| GUUGUGACUUGGCCCCCGA | 646 | GUUGUGACUUGGCCCCCGA | 646 | UCGGGGGCCAAGUCACAAC | 1342 |
| AGACCUGGCUCCAGUCCAA | 647 | AGACCUGGCUCCAGUCCAA | 647 | UUGGACUGGAGCCAGGUCU | 1343 |
| CUUGCCUACUAUUCCAUGG | 646 | CUUGCCUACUAUUCCAUGG | 648 | CCAUGGAAUAGUAGGCXAG | 1344 |
| CCCGGUUGCUCUUUCUCUA | 649 | CCCGGUUGCUCUUUCUCUA | 649 | UAGAGAAAGAGCAACCGGG | 1345 |
| CUUUCUCUAUCUUCCUCUU | 650 | CUUUCUCUAUCUUCCUCUU | 650 | AAGAGGAAGAUAGAGAAAG | 1346 |
| AGGGUGGCUUCAUGCCUCA | 651 | AGGGUGGCUUCAUGCCUCA | 651 | UGAGGCAUGAAGCCACCCU | 1347 |
| AAGACCUGGCUCCAGUCCA | 652 | AAGACCUGGCUCCAGUCCA | 652 | UGGACUGGAGCCAGGUCUU | 1348 |
| CCGGUUGCUCUUUCUCUAU | 653 | CCGGUUGCUCUUUCUCUAU | 653 | AUAGAGAAAGAGCAACCGG | 1349 |
| CGGUUGCUCUUUCUCUAUC | 654 | CGGUUGCUCUUUCUCUAUC | 654 | GAUAGAGAAAGAGCAACCG | 1350 |
| UGGGGGAUUUCCACUACGU | 655 | UGGGGGAUUUCCACUACGU | 655 | ACGUAGUGGAAAUCCCCCA | 1351 |
| AUGUCACGAACGACUGCUC | 656 | AUGUCACGAACGACUGCUC | 656 | GAGCAGUCGUUCGUGACAU | 1352 |
| GGCCUAGUUGGGGCCCCAC | 657 | GGCCUAGUUGGGGCCCCAC | 657 | GUGGGGCCCCAACUAGGCC | 1353 |
| UGGACCAAGCGGAGACGGC | 658 | UGGACCAAGCGGAGACGGC | 658 | GCCGUCUCCGCUUGGUCCA | 1354 |
| UUCCAGGUCGGGCUCAACC | 659 | UUCCAGGUCGGGCUCAACC | 659 | GGUUGAGCCCGACCUGGAA | 1355 |
| AGCGGGUCGAGUUCCUGGU | 660 | AGCGGGUCGAGUUCCUGGU | 660 | ACCAGGAACUCGACCCGCU | 1356 |
| CAAGGAGAUGAAGGCGAAG | 661 | CAAGGAGAUGAAGGCGAAG | 661 | CUUCGCCUUCAUCUCCUUG | 1357 |
| CAUGUCACGAACGACUGCU | 662 | CAUGUCACGAACGACUGCU | 662 | AGCAGUCGUUCGUGACAUG | 1358 |
| CAGCGGGUCGAGUUCCUGG | 663 | CAGCGGGUCGAGUUCCUGG | 663 | CCAGGAACUCGACCCGCUG | 1359 |
| UUCCACUACGUGACGGGCA | 664 | UUCCACUACGUGACGGGCA | 664 | UGCCCGUCACGUAGUGGAA | 1360 |
| UAGGGUGGCUUCAUGCCUC | 665 | UAGGGUGGCUUCAUGCCUC | 665 | GAGGCAUGAAGCCACCCUA | 1361 |
| UCCAGGACUGCACGAUGCU | 666 | UCCAGGACUGCACGAUGCU | 666 | AGCAUCGUGCAGUCCUGGA | 1362 |
| UCCACUACGUGACGGGCAU | 667 | UCCACUACGUGACGGGCAU | 667 | AUGCCCGUCACGUAGUGGA | 1363 |
| AAUAGGGUGGCUUCAUGCC | 668 | AAUAGGGUGGCUUCAUGCC | 668 | GGCAUGAAGCCACCCUAUU | 1364 |
| GUCUUCACGGAGGCUAUGA | 669 | GUCUUCACGGAGGCUAUGA | 669 | UCAUAGCCUCCGUGAAGAC | 1365 |
| AUAGGGUGGCUUCAUGCCU | 670 | AUAGGGUGGCUUCAUGCCU | 670 | AGGCAUGAAGCCACCCUAU | 1366 |
| UCUUCACGGAGGCUAUGAC | 671 | UCUUCACGGAGGCUAUGAC | 671 | GUCAUAGCCUCCGUGAAGA | 1367 |
| AUGCCUCAGGAAACUUGGG | 672 | AUGCCUCAGGAAACUUGGG | 672 | CCCAAGUUUCCUGAGGCAU | 1368 |
| ACCGGGACGUGCUCAAGGA | 673 | ACCGGGACGUGCUCAAGGA | 673 | UCCUUGAGCACGUCCCGGU | 1369 |
| GGGGCUGUGCAGUGGAUGA | 674 | GGGGCUGUGCAGUGGAUGA | 674 | UCAUCCACUGCACAGCCCC | 1370 |
| AAGCUCCAGGACUGCACGA | 675 | AAGCUCCAGGACUGCACGA | 675 | UCGUGCAGUCCUGGAGCUU | 1371 |
| GCUCCAGGACUGCACGAUG | 676 | GCUCCAGGACUGCACGAUG | 676 | CAUCGUGCAGUCCUGGAGC | 1372 |
| UACCGGGACGUGCUCAAGG | 677 | UACCGGGACGUGCUCAAGG | 677 | CCUUGAGCACGUCCCGGUA | 1373 |
| GGGCUGUGCAGUGGAUGAA | 678 | GGGCUGUGCAGUGGAUGAA | 678 | UUCAUCCACUGCACAGCCC | 1374 |
| CGUCAAGUUCCCGGGCGGU | 679 | CGUCAAGUUCCCGGGCGGU | 679 | ACCGCCCGGGAACUUGACG | 1375 |
| UCAAUAGGGUGGCUUCAUG | 680 | UCAAUAGGGUGGCUUCAUG | 680 | CAUGAAGCCACCCUAUUGA | 1376 |
| AGUCUUCACGGAGGCUAUG | 681 | AGUCUUCACGGAGGCUAUG | 681 | CAUAGCCUCCGUGAAGACU | 1377 |
| GGACCAAGCGGAGACGGCU | 682 | GGACCAAGCGGAGACGGCU | 682 | AGCCGUCUCCGCUUGGUCC | 1378 |
| GGCUCCAGUCCAAGCUCCU | 683 | GGCUCCAGUCCAAGCUCCU | 683 | AGGAGCUUGGACUGGAGCC | 1379 |
| GGCUGUGCAGUGGAUGAAC | 684 | GGCUGUGCAGUGGAUGAAC | 684 | GUUCAUCCACUGCACAGCC | 1380 |
| CUCCAGGACUGCACGAUGC | 685 | CUCCAGGACUGCACGAUGC | 685 | GCAUCGUGCAGUCCUGGAG | 1381 |
| GAGUCUUCACGGAGGCUAU | 686 | GAGUCUUCACGGAGGCUAU | 686 | AUAGCCUCCGUGAAGACUC | 1382 |
| UGGCUCCAGUCCAAGCUCC | 687 | UGGCUCCAGUCCAAGCUCC | 687 | GGAGCUUGGACUGGAGCCA | 1383 |
| GGGGAUUUCCACUACGUGA | 688 | GGGGAUUUCCACUACGUGA | 688 | UCACGUAGUGGAAAUCCCC | 1384 |
| CAUGCCUCAGGAAACUUGG | 689 | CAUGCCUCAGGAAACUUGG | 689 | CCAAGUUUCCUGAGGCAUG | 1385 |
| AUCAAUAGGGUGGCUUCAU | 690 | AUCAAUAGGGUGGCUUCAU | 690 | AUGAAGCCACCCUAUUGAU | 1386 |
| GCGGGCCUUGCCUACUAUU | 691 | GCGGGCCUUGCCUACUAUU | 691 | AAUAGUAGGCAAGGCCCGC | 1387 |
| CCGGGACGUGCUCAAGGAG | 692 | CCGGGACGUGCUCAAGGAG | 692 | CUCCUUGAGCACGUCCCGG | 1388 |
| CCAUGGUGGGGAACUGGGC | 693 | CCAUGGUGGGGAACUGGGC | 693 | GCCCAGUUCCCCACCAUGG | 1389 |
| CAAUAGGGUGGCUUCAUGC | 694 | CAAUAGGGUGGCUUCAUGC | 694 | GCAUGAAGCCACCCUAUUG | 1390 |
| AGCUCCAGGACUGCACGAU | 695 | AGCUCCAGGACUGCACGAU | 695 | AUCGUGCAGUCCUGGAGCU | 1391 |
| CGGGCCUUGCCUACUAUUC | 696 | CGGGCCUUGCCUACUAUUC | 696 | GAAUAGUAGGCAAGGCCCG | 1392 |

The 3′-ends of the Upper sequence and the Lower sequence of the siNA construct can include an overhang sequence, for example about 1, 2, 3, or 4 nucleotides in length, preferably 2 nucleotides in length, wherein the overhanging sequence of the lower sequence is optionally complementary to a portion of the target sequence. The upper sequence is also referred to as the sense strand, whereas the lower sequence is also referred to as the antisense strand. The upper and lower sequences in the Table can further comprise a chemical modification having Formulae I-VII, such as exemplary siNA constructs shown in FIGS. 4 and 5, or having modifications described in Table IV or any combination thereof.

TABLE III
HCV Synthetic Modified siNA Constructs

| | | | | | | |
|---|---|---|---|---|---|---|
| Target | | Seq | | | | Seq |
| Pos | Target | ID | Cmpd# | Aliases | Sequence | ID |

| | | | | | | |
|---|---|---|---|---|---|---|
| 183 | GGUCCUUUCUUGGAUCAACCCGC | 1393 | 25237 | HCV IRES Loop IIIb (Heptazyme | B GGUCCUUUCUUGGAUCAACCC B | 1467 |
| | | | | site) as siNA str1 (sense) | | |
| 183 | GGUCCUUUCUUGGAUCAACCCGC | 1393 | 25238 | HCV IRES Loop IIIb (Heptazyme | B GGGUUGAUCCAAGAAAGGACC B | 1468 |
| | | | | site) as siNA str2 | | |
| | | | | (antisense) | | |
| 183 | GGUCCUUUCUUGGAUCAACCCGC | 1393 | 25251 | HCV IRES Loop IIIb (Heptazyme | B CCCAACUAGGUUCUUUCCUGG B | 1469 |
| | | | | site) as sINA str1 (sense) | | |
| | | | | Inverted Control | | |
| 183 | GGUCCUUUCUUGGAUCAACCCGC | 1393 | 25252 | HCV IRES Loop IIIb (Heptazyme | B CCAGGAAAGAACCUAGUUGGG B | 1470 |
| | | | | site) as siNA str1 (sense) | | |
| | | | | Inverted Control Compliment | | |
| 183 | GGUCCUUUCUUGGAUCAACCCGC | 1393 | 25814 | HCV IRES Loop IIIb (Heptazyme | GGUCCUUUCUUGGAUCAACCCUU | 1471 |
| | | | | site) as siNA str1 (sense) | | |
| | | | | +2U overhang | | |
| 183 | GGUCCUUUCUUGGAUCAACCCGC | 1393 | 25815 | HCV IRES Loop IIIb (Heptazyme | GGGUUGAUCCAAGAAAGGACCUU | 1472 |
| | | | | site) as siNA str2 | | |
| | | | | (antisense) +2U overhang | | |
| 183 | GGUCCUUUCUUGGAUCAACCCGC | 1393 | 25834 | HCV IRES Loop IlIb (Heptazyme | BGGUCCUUUCUUGGAUCAACCCUUB | 1473 |
| | | | | site) as siNA str1 (sense) | | |
| | | | | +2U overhang | | |
| 183 | GGUCCUUUCUUGGAUCAACCCGC | 1393 | 25835 | HCV IRES Loop IIIb (Heptazyme | BGGGUUGAUCCAAGAAAGGACCUUB | 1474 |
| | | | | site) as siNA str2 | | |
| | | | | (antisense) +2U overhang | | |
| 325 | UGCCCCGGGAGGUCUCGUAGACC | 1394 | 28415 | HCVa:325U21 sense TT siNA | CCCCGGGAGGUCUCGUAGATT | 1475 |
| 162 | CGGAACCGGUGAGUACACC | 54 | 28416 | HCVa:162U21 sense TT siNA | CGGAACCGGUGAGUACACCTT | 1476 |
| 324 | GCCCCGGGAGGUCUCGUAG | 1 | 28417 | HCVa:324U21 sense TT siNA | GCCCCGGGAGGUCUCGUAGTT | 1477 |
| 163 | GGAACCGGUGAGUACACCG | 53 | 28418 | HCVa:163U21 sense TT siNA | GGAACCGGUGAGUACACCGTT | 1478 |
| 294 | GUGGUACUGCCUGAUAGGG | 5 | 28419 | HCVa:294U21 sense TT siNA | GUGGUACUGCCUGAUAGGGTT | 1479 |
| 293 | UGUGGUACUGCCUGAUAGG | 2 | 28420 | HCVa:293U21 sense TT siNA | UGUGGUACUGCCUGAUAGGTT | 1480 |
| 292 | UUGUGGUACUGCCUGAUAG | 3 | 28421 | HCVa:292U21 sense TT siNA | UUGUGGUACUGCCUGAUAGTT | 1481 |
| 325 | UGCCCCGGGAGGUCUCGUAGACC | 1394 | 28422 | HCVa:343L21 antisense TT siNA | UCUACGAGACCUCCCGGGGTT | 1482 |
| | | | | (325C) | | |
| 162 | CGGAACCGGUGAGUACACC | 54 | 28423 | HCVa:180L21 antisense TT siNA | GGUGUACUCACCGGUUCCGTT | 1483 |
| | | | | (162C) | | |
| 324 | GCCCCGGGAGGUCUCGUAG | 1 | 28424 | HCVa:342L21 antisense TT siNA | CUACGAGACCUCCCGGGGCTT | 1484 |
| | | | | (324C) | | |
| 163 | GGAACCGGUGAGUACACCG | 53 | 28425 | HCVa:181L21 antisense TT siNA | CGGUGUACUCACCGGUUCCTT | 1485 |
| | | | | (163C) | | |
| 294 | GUGGUACUGCCUGAUAGGG | 5 | 28426 | HCVa:312L21 antisense TT siNA | CCCUAUCAGGCAGUACCACTT | 1486 |
| | | | | (294C) | | |
| 293 | UGUGGUACUGCCUGAUAGG | 2 | 28427 | HCVa:311L21 antisense TT siNA | CCUAUCAGGCAGUACCACATT | 1487 |
| | | | | (293C) | | |
| 292 | UUGUGGUACUGCCUGAUAG | 3 | 28428 | HCVa:310L21 antisense TT siNA | CUAUCAGGCAGUACCACAATT | 1488 |
| | | | | (292C) | | |
| 325 | UGCCCCGGGAGGUCUCGUAGACC | 1394 | 28429 | HCVa:325U21 sense TT siNA inv | TTAGAUGCUCUGGAGGGCCCC | 1489 |
| 162 | CGGAACCGGUGAGUACACC | 54 | 28430 | HCVa:162U21 sense TT siNA inv | TTCCACAUGAGUGGCCAAGGC | 1490 |
| 324 | GCCCCGGGAGGUCUCGUAG | 1 | 28431 | HCVa:324U21 sense TT siNA inv | TTGAUGCUCUGGAGGGCCCCG | 1491 |
| 163 | GGAACCGGUGAGUACACCG | 53 | 28432 | HCVa:163U21 sense TT siNA inv | TTGCCACAUGAGUGGCCAAGG | 1492 |
| 294 | GUGGUACUGCCUGAUAGGG | 5 | 28433 | HCVa:294U21 sense TT siNA inv | TTGGGAUAGUCCGUCAUGGUG | 1493 |
| 293 | UGUGGUACUGCCUGAUAGG | 2 | 28434 | HCVa:293U21 sense TT siNA inv | TTGGAUAGUCCGUCAUGGUGU | 1494 |
| 292 | UUGUGGUACUGCCUGAUAG | 3 | 28435 | HCVa:292U21 sense TT siNA inv | TTGAUAGUCCGUCAUGGUGUU | 1495 |
| 325 | UGCCCCGGGAGGUCUCGUAGACC | 1394 | 28436 | HCVa:343L21 antisense TT siNA | TTGGGGCCCUCCAGAGCAUCU | 1496 |
| | | | | (325C) inv | | |
| 162 | CGGAACCGGUGAGUACACC | 54 | 28437 | HCVa:180L21 antisense TT siNA | TTGCCUUGGCCACUCAUGUGG | 1497 |
| | | | | (162C) inv | | |
| 324 | GCCCCGGGAGGUCUCGUAG | 1 | 28438 | HCVa:342L21 antisense TT siNA | TTCGGGGCCCUCCAGAGCAUC | 1498 |
| | | | | (324C) inv | | |
| 163 | GGAACCGGUGAGUACACCG | 53 | 28439 | HCVa:181L21 antisense TT siNA | TTCCUUGGCCACUCAUGUGGC | 1499 |
| | | | | (163C) inv | | |
| 294 | GUGGUACUGCCUGAUAGGG | 5 | 28440 | HCVa:312L21 antisense TT siNA | TTCACCAUGACGGACUAUCCC | 1500 |
| | | | | (294C) inv | | |
| 293 | UGUGGUACUGCCUGAUAGG | 2 | 28441 | HCVa:311L21 antisense TT siNA | TTACACCAUGACGGACUAUCC | 1501 |
| | | | | (293C) inv | | |
| 292 | UUGUGGUACUGCCUGAUAG | 3 | 28442 | HCVa:310L21 antisense TT siNA | TTAACACCAUGACGGACUAUC | 1502 |
| | | | | (292C) inv | | |
| 162 | UGCGGAACCGGUGAGUACACCGG | 1395 | 29573 | HCVa:162U21 sense siNA | CGGAACCGGUGAGUACACCGG | 1503 |
| 163 | GCGGAACCGGUGAGUACACCGGA | 1396 | 29574 | HCVa:163U21 sense siNA | GGAACCGGUGAGUACACCGGA | 1504 |
| 292 | CCUUGUGGUACUGCCUGAUAGGG | 1397 | 29575 | HCVa:292U21 sense siNA | UUGUGGUACUGCCUGAUAGGG | 1505 |
| 293 | CUUGUGGUACUGCCUGAUAGGGU | 1398 | 29576 | HCVa:293U21 sense siNA | UGUGGUACUGCCUGAUAGGGU | 1506 |
| 294 | UUGUGGUACUGCCUGAUAGGGUG | 1399 | 29577 | HCVa:294U21 sense siNA | GUGGUACUGCCUGAUAGGGUG | 1507 |
| 324 | GUGCCCCGGGAGGUCUCGUAGAC | 1400 | 29578 | HCVa:324U21 sense siNA | GCCCCGGGAGGUCUCGUAGAC | 1508 |
| 325 | UGCCCCGGGAGGUCUCGUAGACC | 1394 | 29579 | HCVa:325U21 sense siNA | CCCCGGGAGGUCUCGUAGACC | 1509 |
| 162 | UGCGGAACCGGUGAGUACACCGG | 1395 | 29580 | HCVa:180L21 antisense siNA | GGUGUACUCACCGGUUCCGCA | 1510 |
| | | | | (162C) | | |
| 163 | GCGGAACCGGUGAGUACACCGGA | 1396 | 29581 | HCVa:181L21 antisense siNA | CGGUGUACUCACCGGUUCCGC | 1511 |
| | | | | (163C) | | |
| 292 | CCUUGUGGUACUGCCUGAUAGGG | 1397 | 29582 | HCVa:310L21 antisense siNA | CUAUCAGGCAGUACCACAAGG | 1512 |
| | | | | (292C) | | |
| 293 | CUUGUGGUACUGCCUGAUAGGGU | 1398 | 29583 | HCVa:311L21 antisense siNA | CCUAUCAGGCAGUACCACAAG | 1513 |
| | | | | (293C) | | |
| 294 | UUGUGGUACUGCCUGAUAGGGUG | 1399 | 29584 | HCVa:312L21 antisense siNA | CCCUAUCAGGCAGUACCACAA | 1514 |
| | | | | (294C) | | |
| 324 | GUGCCCCGGGAGGUCUCGUAGAC | 1400 | 29585 | HCVa:342L21 antisense siNA | CUACGAGACCUCCCGGGGCAC | 1515 |
| | | | | (324C) | | |
| 325 | UGCCCCGGGAGGUCUCGUAGACC | 1394 | 29586 | HCVa:343L21 antisense siNA | UCUACGAGACCUCCCGGGGCA | 1516 |
| | | | | (325C) | | |
| 162 | UGCGGAACCGGUGAGUACACCGG | 1395 | 29587 | HCVa:162U21 sense siNA inv | GGCCACAUGAGUGGCCAAGGC | 1517 |
| 163 | GCGGAACCGGUGAGUACACCGGA | 1396 | 29588 | HCVa:163U21 sense siNA inv | AGGCCACAUGAGUGGCCAAGG | 1518 |
| 292 | CCUUGUGGUACUGCCUGAUAGGG | 1397 | 29589 | HCVa:292U21 sense siNA inv | GGGAUAGUCCGUCAUGGUGUU | 1519 |
| 293 | CUUGUGGUACUGCCUGAUAGGGU | 1398 | 29590 | HCVa:293U21 sense siNA inv | UGGGAUAGUCCGUCAUGGUGU | 1520 |
| 294 | UUGUGGUACUGCCUGAUAGGGUG | 1399 | 29591 | HCVa:294U21 sense siNA inv | GUGGGAUAGUCCGUCAUGGUG | 1521 |
| 324 | GUGCCCCGGGAGGUCUCGUAGAC | 1400 | 29592 | HCVa:324U21 sense siNA inv | CAGAUGCUCUGGAGGGCCCCG | 1522 |
| 325 | UGCCCCGGGAGGUCUCGUAGACC | 1394 | 29593 | HCVa:325U21 sense siNA inv | CCAGAUGCUCUGGAGGGCCCC | 1523 |
| 162 | UGCGGAACCGGUGAGUACACCGG | 1395 | 29594 | HCVa:180L21 antisense siNA | ACGCCUUGGCCACUCAUGUGG | 1524 |
| | | | | (162C) inv | | |
| 163 | GCGGAACCGGUGAGUACACCGGA | 1396 | 29595 | HCVa:181L21 antisensesiNA | CGCCUUGGCCACUCAUGUGGC | 1525 |
| | | | | (163C) inv | | |
| 292 | CCUUGUGGUACUGCCUGAUAGGG | 1397 | 29596 | HCVa:310L21 antisense siNA | GGAACACCAUGACGGACUAUC | 1526 |
| | | | | (292C) inv | | |
| 293 | CUUGUGGUACUGCCUGAUAGGGU | 1398 | 29597 | HCVa:311L21 antisense siNA | GAACACCAUGACGGACUAUCC | 1527 |
| | | | | (293C) inv | | |
| 294 | UUGUGGUACUGCCUGAUAGGGUG | 1399 | 29598 | HCVa:312L21 antisense siNA | AACACCAUGACGGACUAUCCC | 1528 |
| | | | | (294C) inv | | |
| 324 | GUGCCCCGGGAGGUCUCGUAGAC | 1400 | 29599 | HCVa:342L21 antisense siNA | CACGGGGCCCUCCAGAGCAUC | 1529 |
| | | | | (324C) inv | | |
| 325 | UGCCCCGGGAGGUCUCGUAGACC | 1394 | 29600 | HCVa:343L21 antisense siNA | ACGGGGCCCUCCAGAGCAUCU | 1530 |
| | | | | (325C) inv | | |
| 325 | UGCCCCGGGAGGUCUCGUAGACC | 1394 | 30051 | HCVa:325U21 sense siNA 5 5′ | BCsCsCsCsGsGGAGGUCUCGUAGAXXB | 1531 |
| | | | | P = S + 3′ univ. base | | |
| | | | | 2 + 5/3′ invAba | | |
| 325 | UGCCCCGGGAGGUCUCGUAGACC | 1394 | 30052 | HCVa:325U21 sense siNA inv | BAsGsAsUsGsCUCUGGAGGGCCCCXXB | 1532 |
| | | | | 5 5′ P = S + 3′ univ. base | | |
| | | | | 2 + 5/3′ invAba | | |
| 325 | UGCCCCGGGAGGUCUCGUAGACC | 1394 | 30053 | HCVa:343L21 antisense siNA | UsCsUsAsCsGAGACCUCCCGGGGXXB | 1533 |
| | | | | (325C) 5 5′ P=S + 3′ univ. | | |
| | | | | base 2 + 3′ invAba | | |
| 325 | UGCCCCGGGAGGUCUCGUAGACC | 1394 | 30054 | HCVa:343L21 antisense siNA | GsGsGsGsCsCCUCCAGAGCAUCUXXB | 1534 |
| | | | | (325C) inv 5 5′ P = S + 3′ | | |
| | | | | univ. base 2 + 3′ invAba | | |
| 325 | UGCCCCGGGAGGUCUCGUAGACC | 1394 | 30055 | HCVa:325U21 sense siNA all | BCsCsCsCsGGGAGGUsCsUsCsGU | 1535 |
| | | | | Y P = S + 3′ univ. base | sAGAXXB | |
| | | | | 2 + 5/3′ invAba | | |
| 325 | UGCCCCGGGAGGUCUCGUAGACC | 1394 | 30056 | HCVa:325U21 sense siNA inv | BAGAUsGCsUsCsUsGGAGGGCsCs | 1536 |
| | | | | all Y P = S + 3′ univ. base | CsCsXXB | |
| | | | | 2 + 5/3′ invAba | | |
| 325 | UGCCCCGGGAGGUCUCGUAGACC | 1394 | 30057 | HCVa:343L21 antisense siNA | UsCsUsACsGAGACsCsUsCsCsCs | 1537 |
| | | | | (325C) all Y P = S + 3′ | GGGGXXB | |
| | | | | univ. base 2 + 3′ invAba | | |
| 325 | UGCCCCGGGAGGUCUCGUAGACC | 1394 | 30058 | HCVa:343L21 antisense siNA | GGGGCsCsCsUsCsCsAGAGCsAUs | 1538 |
| | | | | (325C) inv all Y P = S + 3′ | CsUsXXB | |
| | | | | univ. base 2 + 3′ invAba | | |
| 325 | UGCCCCGGGAGGUCUCGUAGACC | 1394 | 30059 | HCVa:325U21 sense siNA 4/3 | BcscscscsGGGAGGucucGuAsGs | 1539 |
| | | | | P = S ends + all Y-2′F + 3′ | AsXXB | |
| | | | | univ. base 2 + 5/3′ invAba | | |
| 325 | UGCCCCGGGAGGUCUCGUAGACC | 1394 | 30060 | HCVa:325U21 sense siNA inv | BAsGsAsusGcucuGGAGGGccscs | 1540 |
| | | | | 4/3 P = S ends + all | csXXB | |
| | | | | Y-2′F + 3′ univ. base | | |
| | | | | 2 + 5/3′ invAba | | |
| 325 | UGCCCCGGGAGGUCUCGUAGACC | 1394 | 30170 | HCVa:325U21 sense siNA all | B ccccGGGAGGucucGuAGAXX B | 1541 |
| | | | | Y-2′F + 3′ univ. base | | |
| | | | | 2 + 5′/3′ invAba | | |
| 325 | UGCCCCGGGAGGUCUCGUAGACC | 1394 | 30171 | HCVa:325U21 sense siNA inv | B AGAuGcucuGGAGGGccccXX B | 1542 |
| | | | | all Y-2′F + 3′ univ. base | | |
| | | | | 2 + 5/3′ invAba | | |
| 325 | UGCCCCGGGAGGUCUCGUAGACC | 1394 | 30172 | HCVa:343L21 antisense siNA | B UsCsUsACsGAGACsCsUsCsCs | 1543 |
| | | | | (325C) all Y P = S + 3′ | CsGGGGXX B | |
| | | | | univ. base 2 + 5/3′ invAba | | |
| 325 | UGCCCCGGGAGGUCUCGUAGACC | 1394 | 30173 | HCVa:343L19 antisense siNA | ucuAcGAGAccucccGGGG | 1544 |
| | | | | (325C) all Y-2′F | | |
| 325 | UGCCCCGGGAGGUCUCGUAGACC | 1394 | 30175 | HCVa:343L21 antisense siNA | ucuAcGAGAccucccGGGGXX | 1545 |
| | | | | (325C) all Y-2′F + 3′ univ. | | |
| | | | | Base 2 | | |
| 325 | UGCCCCGGGAGGUCUCGUAGACC | 1394 | 30176 | HCVa:343L21 antisense siNA | GGGGcccuccAGAGcAucuXX | 1546 |
| | | | | (325C) inv all Y-2′F + 3′ | | |
| | | | | univ. Base 2 | | |
| 325 | UGCCCCGGGAGGUCUCGUAGACC | 1394 | 30177 | HCVa:343L21 antisense siNA | B ucuAcGAGAccucccGGGGXX B | 1547 |
| | | | | (325C) all Y-2′F + 3′ univ. | | |
| | | | | Base 2 + 5′/3′ iB | | |
| 325 | UGCCCCGGGAGGUCUCGUAGACC | 1394 | 30178 | HCVa:325U21 sense siNA all | CsCsCsCsGGGAGGUsCsUsCsGUs | 1548 |
| | | | | Y P = S + 3′ univ. base | AGAXX B | |
| | | | | 2 + 3′ invAba | | |
| 325 | UGCCCCGGGAGGUCUCGUAGACC | 1394 | 30417 | HCVa:325U21 sense siNA w/iB | CCCCGGGAGGUCUCGUAGACC B | 1549 |
| 325 | UGCCCCGGGAGGUCUCGUAGACC | 1394 | 30418 | HCVa:325U21 sense siNA w/iB | B CCCCGGGAGGUCUCGUAGACC B | 1550 |
| 325 | UGCCCCGGGAGGUCUCGUAGACC | 1394 | 30419 | HCVa:343L21 antisense siNA | UCUACGAGACCUCCCGGGGCA B | 1551 |
| | | | | (325C) w/iB | | |
| 325 | UGCCCCGGGAGGUCUCGUAGACC | 1394 | 30420 | HCVa:343L21 antisense siNA | B UCUACGAGACCUCCCGGGGCA B | 1552 |
| | | | | (325C) w/iB | | |
| 325 | UGCCCCGGGAGGUCUCGUAGACC | 1394 | 30561 | HCVa:325U21 sense siNA | B ccccGGGAGGucucGuAGATT B | 1553 |
| | | | | Y-2′Ome (stab06) + 5′/3′ | | |
| | | | | invAba | | |
| 325 | UGCCCCGGGAGGUCUCGUAGACC | 1394 | 30562 | HCVa:343L21 antisense siNA | ucuAcGAGAccucccGGGGTsT | 1554 |
| | | | | (325C) Y-2′F, R-2′Ome + TsT | | |
| 153 | AUAGUGGUCUGCGGAACCGGUGA | 1401 | 30649 | HCVa:153U21 sense siNA stab07 | B AGuGGucuGcGGAAccGGuTT B | 1555 |
| 159 | GUCUGCGGAACCGGUGAGUACAC | 1402 | 30650 | HCVa:159U21 sense siNA stab07 | B cuGcGGAAccGGuGAGuAcTT B | 1556 |
| 291 | GCCUUGUGGUACUGCCUGAUAGG | 1403 | 30651 | HCVa:291U21 sense siNA stab07 | B cuuGuGGuAcuGccuGAuATT B | 1557 |
| 295 | UGUGGUACUGCCUGAUAGGGUGC | 1404 | 30652 | HCVa:295U21 sense siNA stab07 | B uGGuAcuGccuGAuAGGGuTT B | 1558 |
| 296 | GUGGUACUGCCUGAUAGGGUGCU | 1405 | 30653 | HCVa:296U21 sense siNA stab07 | B GGuAcuGccuGAuAGGGuGTT B | 1559 |
| 297 | UGGUACUGCCUGAUAGGGUGCUU | 1406 | 30654 | HCVa:297U21 sense siNA stab07 | B GuAcuGccuGAuAGGGuGcTT B | 1560 |
| 298 | GGUACUGCCUGAUAGGGUGCUUG | 1407 | 30655 | HCVa:298U21 sense siNA stab07 | B uAcuGccuGAuAGGGuGcuTT B | 1561 |
| 300 | UACUGCCUGAUAGGGUGCUUGCG | 1408 | 30656 | HCVa:300U21 sense siNA stab07 | B cuGccuGAuAGGGuGcuuGTT B | 1562 |
| 301 | ACUGCCUGAUAGGGUGCUUGCGA | 1409 | 30657 | HCVa:301U21 sense siNA stab07 | B uGccuGAuAGGGuGcuuGcTT B | 1563 |
| 303 | UGCCUGAUAGGGUGCUUGCGAGU | 1410 | 30658 | HCVa:303U21 sense siNA stab07 | B ccuGAuAGGGuGcuuGcGATT B | 1564 |
| 306 | CUGAUAGGGUGCUUGCGAGUGCC | 1411 | 30659 | HCVa:306U21 sense siNA stab07 | B GAuAGGGuGcuuGcGAGuGTT B | 1565 |
| 324 | GUGCCCCGGGAGGUCUCGUAGAC | 1400 | 30660 | HCVa:324U21 sense siNA stab07 | B GccccGGGAGGucucGuAGTT B | 1566 |
| 153 | AUAGUGGUCUGCGGAACCGGUGA | 1401 | 30661 | HCVa:171L21 antisense siNA | AccGGuuccGcAGAccAcuTsT | 1567 |
| | | | | (153C) stab08 | | |
| 159 | GUCUGCGGAACCGGUGAGUACAC | 1402 | 30662 | HCVa:177L21 antisense siNA | GuAcucAccGGuuccGcAGTsT | 1568 |
| | | | | (159C) stab08 | | |
| 291 | GCCUUGUGGUACUGCCUGAUAGG | 1403 | 30663 | HCVa:309L21 antisense siNA | uAucAGGcAGuAccAcAAGTsT | 1569 |
| | | | | (291C) stab08 | | |
| 295 | UGUGGUACUGCCUGAUAGGGUGC | 1404 | 30664 | HCVa:313L21 antisense siNA | AcccuAucAGGcAGuAccATsT | 1570 |
| | | | | (295C) stab08 | | |
| 296 | GUGGUACUGCCUGAUAGGGUGCU | 1405 | 30665 | HCVa:314L21 antisense siNA | cAcccuAucAGGcAGuAccTsT | 1571 |
| | | | | (296C) stab08 | | |
| 297 | UGGUACUGCCUGAUAGGGUGCUU | 1406 | 30666 | HCVa:315L21 antisense siNA | GcAcccuAucAGGcAGuAcTsT | 1572 |
| | | | | (297C) stab08 | | |
| 298 | GGUACUGCCUGAUAGGGUGCUUG | 1407 | 30667 | HCVa:316L21 antisense siNA | AGcAcccuAucAGGcAGuATsT | 1573 |
| | | | | (298C) stab08 | | |
| 300 | UACUGCCUGAUAGGGUGCUUGCG | 1408 | 30668 | HCVa:318L21 antisense siNA | cAAGcAcccuAucAGGcAGTsT | 1574 |
| | | | | (300C) stab08 | | |
| 301 | ACUGCCUGAUAGGGUGCUUGCGA | 1409 | 30669 | HCVa:319L21 antisense siNA | GcAAGcAcccuAucAGGcATsT | 1575 |
| | | | | (301C) stab08 | | |
| 303 | UGCCUGAUAGGGUGCUUGCGAGU | 1410 | 30670 | HCVa:321L21 antisense siNA | ucGcAAGcAcccuAucAGGTsT | 1576 |
| | | | | (303C) stab08 | | |
| 306 | CUGAUAGGGUGCUUGCGAGUGCC | 1411 | 30671 | HCVa:324L21 antisense siNA | cAcucGcAAGcAcccuAucTsT | 1577 |
| | | | | (306C) stab08 | | |
| 324 | GUGCCCCGGGAGGUCUCGUAGAC | 1400 | 30672 | HCVa:342121 antisense siNA | cuAcGAGAccucccGGGGcTsT | 1578 |
| | | | | (324C) stab08 | | |
| 153 | AUAGUGGUCUGCGGAACCGGUGA | 1401 | 30673 | HCVa:153U21 sense siNA stab07 | B uGGccAAGGcGucuGGuGATT B | 1579 |
| | | | | inv | | |
| 159 | GUCUGCGGAACCGGUGAGUACAC | 1402 | 30674 | HCVa:159U21 sense siNA stab07 | B cAuGAGuGGccAAGGcGucTT B | 1580 |
| | | | | inv | | |
| 291 | GCCUUGUGGUACUGCCUGAUAGG | 1403 | 30675 | HCVa:291U21 sense siNA stab07 | B AuAGuccGucAuGGuGuucTT B | 1581 |
| | | | | inv | | |
| 295 | UGUGGUACUGCCUGAUAGGGUGC | 1404 | 30676 | HCVa:295U21 sense siNA stab07 | B uGGGAuAGuccGucAuGGuTT B | 1582 |
| | | | | inv | | |
| 296 | GUGGUACUGCCUGAUAGGGUGCU | 1405 | 30677 | HCVa:296U21 sense siNA stab07 | B GuGGGAuAGuccGucAuGGTT B | 1583 |
| | | | | inv | | |
| 297 | UGGUACUGCCUGAUAGGGUGCUU | 1406 | 30678 | HCVa:297U21 sense siNA stab07 | B cGuGGGAuAGuccGucAuGTT B | 1584 |
| | | | | inv | | |
| 298 | GGUACUGCCUGAUAGGGUGCUUG | 1407 | 30679 | HCVa:298U21 sense siNA stab07 | B ucGuGGGAuAGuccGucAuTT B | 1585 |
| | | | | inv | | |
| 300 | UACUGCCUGAUAGGGUGCUUGCG | 1408 | 30680 | HCVa:300U21 sense siNA stab07 | B GuucGuGGGAuAGuccGucTT B | 1586 |
| | | | | inv | | |
| 301 | ACUGCCUGAUAGGGUGCUUGCGA | 1409 | 30681 | HCVa:301U21 sense siNA stab07 | B cGuucGuGGGAuAGuccGuTT B | 1587 |
| | | | | inv | | |
| 303 | UGCCUGAUAGGGUGCUUGCGAGU | 1410 | 30682 | HCVa:303U21 sense siNA stab07 | B AGcGuucGuGGGAuAGuccTT B | 1588 |
| | | | | inv | | |
| 306 | CUGAUAGGGUGCUUGCGAGUGCC | 1411 | 30683 | HCVa:306U21 sense siNA stab07 | B GuGAGcGuucGuGGGAuAGTT B | 1589 |
| | | | | inv | | |
| 324 | GUGCCCCGGGAGGUCUCGUAGAC | 1400 | 30684 | HCVa:324U21 sense siNA stab07 | B GAuGcucuGGAGGGccccGTT B | 1590 |
| | | | | inv | | |
| 153 | AUAGUGGUCUGCGGAACCGGUGA | 1401 | 30685 | HCVa:171L21 antisense siNA | ucAccAGAcGccuuGGccATsT | 1591 |
| | | | | (153C) stab08 inv | | |
| 159 | GUCUGCGGAACCGGUGAGUACAC | 1402 | 30686 | HCVa:177L21 antisense siNA | GacGccuuGGccAcucAuGTsT | 1592 |
| | | | | (159C) stab08 inv | | |
| 291 | GCCUUGUGGUACUGCCUGAUAGG | 1403 | 30687 | HCVa:309L21 antisense siNA | GAAcAccAuGAcGGAcuAuTsT | 1593 |
| | | | | (291C) stab08 inv | | |
| 295 | UGUGGUACUGCCUGAUAGGGUGC | 1404 | 30688 | HCVa:313L21 antisense siNA | AccAuGAcGGAcuAucccATsT | 1594 |
| | | | | (295C) stab08 inv | | |
| 296 | GUGGUACUGCCUGAUAGGGUGCU | 1405 | 30689 | HCVa:314L21 antisense siNA | ccAuGAcGGAcuAucccAcTsT | 1595 |
| | | | | (296C) stab08 inv | | |
| 297 | UGGUACUGCCUGAUAGGGUGCUU | 1406 | 30690 | HCVa:315L21 antisense siNA | cAuGAcGGAcuAucccAcGTsT | 1596 |
| | | | | (297C) stab08 inv | | |
| 298 | GGUACUGCCUGAUAGGGUGCUUG | 1407 | 30691 | HCVa:316L21 antisense siNA | AuGAcGGAcuAucccAcGATsT | 1597 |
| | | | | (298C) stab08 inv | | |
| 300 | UACUGCCUGAUAGGGUGCUUGCG | 1408 | 30692 | HCVa:318L21 antisense siNA | GAcGGAcuAucccAcGAAcTsT | 1598 |
| | | | | (300C) stab08 inv | | |
| 301 | ACUGCCUGAUAGGGUGCUUGCGA | 1409 | 30693 | HCVa:319L21 antisense siNA | AcGGAcuAucccAcGAAcGTsT | 1599 |
| | | | | (301C) stab08 inv | | |
| 303 | UGCCUGAUAGGGUGCUUGCGAGU | 1410 | 30694 | HCVa:321L21 antisense siNA | GGAcuAucccAcGAAcGcuTsT | 1600 |
| | | | | (303C) stab08 inv | | |
| 306 | CUGAUAGGGUGCUUGCGAGUGCC | 1411 | 30695 | HCVa:324L21 antisense siNA | cuAucccAcGAAcGcucAcTsT | 1601 |
| | | | | (306C) stab08 inv | | |
| 324 | GUGCCCCGGGAGGUCUCGUAGAC | 1400 | 30696 | HCVa:342L21 antisense siNA | cGGGGcccuccAGAGcAucTsT | 1602 |
| | | | | (324C) stab08 inv | | |
| 325 | UGCCCCGGGAGGUCUCGUAGACC | 1394 | 31340 | HCVa:325U21 sense siNA | B ccccGGGAGGucucGuAGATT B | 1603 |
| | | | | stab04 | | |
| 325 | UGCCCCGGGAGGUCUCGUAGACC | 1394 | 31341 | HCVa:325U21 sense siNA inv | B AGAuGcucuGGAGGGccccTT B | 1604 |
| | | | | stab04 | | |
| 325 | UGCCCCGGGAGGUCUCGUAGACC | 1394 | 31342 | HCVa:343121 antisense siNA | ucuAcGAGAccucccGGGGTsT | 1605 |
| | | | | (325C) stab05 | | |
| 325 | UGCCCCGGGAGGUCUCGUAGACC | 1394 | 31343 | HCVa:343L21 antisense siNA | GGGGcccuccAGAGcAucuTsT | 1606 |
| | | | | (325C) inv stab05 | | |
| 325 | UGCCCCGGGAGGUCUCGUAGACC | 1394 | 31344 | HCVa:325U21 sense siNA | B ccccGGGAGGucucGuAGATT B | 1607 |
| | | | | stab07 | | |
| 325 | UGCCCCGGGAGGUCUCGUAGACC | 1394 | 31345 | HCVa:325U21 sense siNA inv | B AGAuGcucuGGAGGGccccTT B | 1608 |
| | | | | stab07 | | |
| 325 | UGCCCCGGGAGGUCUCGUAGACC | 1394 | 31346 | HCVa:343L21 antisense siNA | GGGGcccuccAGAGcAucuTsT | 1609 |
| | | | | (325C) inv stab08 | | |
| 325 | UGCCCCGGGAGGUCUCGUAGACC | 1394 | 31347 | HCVa:343L21 antisense siNA | ucuAcGAGAccucccGGGGTsT | 1610 |
| | | | | (325C) stab11 | | |
| 325 | UGCCCCGGGAGGUCUCGUAGACC | 1394 | 31348 | HCVa:343L21 antisense siNA | GGGGcccuccAGAGcAucuTsT | 1611 |
| | | | | (325C) inv stab11 | | |
| 153 | AUAGUGGUCUGCGGAACCGGUGA | 1401 | 31453 | HCVa:153U21 sense siNA | B AGuGGucuGcGGAAccGGuTT B | 1612 |
| | | | | stab04 | | |
| 159 | GUCUGCGGAACCGGUGAGUACAC | 1402 | 31454 | HCVa:159U21 sense siNA | B cuGcGGAAccGGuGAGuAcTT B | 1613 |
| | | | | stab04 | | |
| 287 | AAAGGCCUUGUGGUACUGCCUGA | 1412 | 31455 | HCVa:287U21 sense siNA | B AGGccuuGuGGuAcuGccuTT B | 1614 |
| | | | | stab04 | | |
| 291 | GCCUUGUGGUACUGCCUGAUAGG | 1403 | 31456 | HCVa:291U21 sense siNA | B cuuGuGGuAcuGccuGAuATT B | 1615 |
| | | | | stab04 | | |
| 295 | UGUGGUACUGCCUGAUAGGGUGC | 1404 | 31457 | HCVa:295U21 sense siNA | B uGGuAcuGccuGAuAGGGuTT B | 1616 |
| | | | | stab04 | | |
| 296 | GUGGUACUGCCUGAUAGGGUGCU | 1405 | 31458 | HCVa:296U21 sense siNA | B GGuAcuGccuGAuAGGGuGTT B | 1617 |
| | | | | stab04 | | |
| 297 | UGGUACUGCCUGAUAGGGUGCUU | 1406 | 31459 | HCVa:297U21 sense siNA | B GuAcuGccuGAuAGGGuGcTT B | 1618 |
| | | | | stab04 | | |
| 298 | GGUACUGCOUGAUAGGGUGCUUG | 1407 | 31460 | HCVa:298U21 sense siNA | B uAcuGccuGAuAGGGuGcuTT B | 1619 |
| | | | | stab04 | | |
| 300 | UACUGCCUGAUAGGGUGCUUGCG | 1408 | 31461 | HCVa:300U21 sense siNA | B cuGccuGAuAGGGuGcuuGTT B | 1620 |
| | | | | stab04 | | |
| 301 | ACUGCCUGAUAGGGUGCUUGCGA | 1409 | 31462 | HCVa:301U21 sense siNA | B uGccuGAuAGGGuGcuuGcTT B | 1621 |
| | | | | stab04 | | |
| 303 | UGCCUGAUAGGGUGCUUGCGAGU | 1410 | 31463 | HCVa:303U21 sense siNA | B ccuGAuAGGGuGcuuGcGATT B | 1622 |
| | | | | stab04 | | |
| 306 | CUGAUAGGGUGCUUGCGAGUGCC | 1411 | 31464 | HCVa:306U21 sense siNA | B GAuAGGGuGcuuGcGAGuGTT B | 1623 |
| | | | | stab04 | | |
| 153 | AUAGUGGUCUGCGGAACCGGUGA | 1401 | 31465 | HCVa:171L21 antisense siNA | AccGGuuccGcAGAccAcuTsT | 1624 |
| | | | | (153C) stab05 | | |
| 159 | GUCUGCGGAACCGGUGAGUACAC | 1402 | 31466 | HCVa:177L21 antisense siNA | GuAcucAccGGuuccGcAGTsT | 1625 |
| | | | | (159C) stab05 | | |
| 287 | AAAGGCCUUGUGGUACUGCCUGA | 1412 | 31467 | HCVa:305L21 antisense siNA | AGGcAGuAccAcMGGccuTsT | 1626 |
| | | | | (287C) stab05 | | |
| 291 | GCCUUGUGGUACUGCCUGAUAGG | 1403 | 31468 | HCVa:309L21 antisense siNA | | |
| | | | | (291C) stab05 | uAucAGGcAGuAccAcAAGTsT | 1627 |
| 295 | UGUGGUACUGCCUGAUAGGGUGC | 1404 | 31469 | HCVa:313L21 antisense siNA | | |
| | | | | (295C) stab05 | AcccuAucAGGcAGuAccATsT | 1628 |
| 296 | GUGGUACUGCCUGAUAGGGUGCU | 1405 | 31470 | HCVa:314L21 antisense siNA | | |
| | | | | (296C) stab05 | cAcccuAucAGGcAGuAccTsT | 1629 |
| 297 | UGGUACUGCCUGAUAGGGUGCUU | 1406 | 31471 | HCVa:315L21 antisense siNA | | |
| | | | | (297C) stab05 | GcAcccuAucAGGcAGuAcTsT | 1630 |
| 298 | GGUACUGCCUGAUAGGGUGCUUG | 1407 | 31472 | HCVa:316L21 antisense siNA | | |
| | | | | (298C) stab05 | AGcAcccuAucAGGcAGuATsT | 1631 |
| 300 | UACUGCCUGAUAGGGUGCUUGCG | 1408 | 31473 | HCVa:318L21 antisense siNA | | |
| | | | | (300C) stab05 | cAAGcAcccuAucAGGcAGTsT | 1632 |
| 301 | ACUGCCUGAUAGGGUGCUUGCGA | 1409 | 31474 | HCVa:319L21 antisense siNA | | |
| | | | | (301C) stabo5 | GcAAGcAcccuAucAGGcATsT | 1633 |
| 303 | UGCCUGAUAGGGUGCUUGCGAGU | 1410 | 31475 | HCVa:321L21 antisense siNA | | |
| | | | | (303C) stab05 | ucGcAAGcAcccuAucAGGTsT | 1634 |
| 306 | CUGAUAGGGUGCUUGCGAGUGCC | 1411 | 31476 | HCVa:324L21 antisense siNA | | |
| | | | | (306C) stab05 | cAcucGcAAGcAcccuAucTsT | 1635 |
| 153 | AUAGUGGUCUGCGGAACCGGUGA | 1401 | 31477 | HCVa:153U21 sense siNA inv | B uGGccAAGGcGucuGGuGATT B | 1636 |
| | | | | stab04 | | |
| 159 | GUCUGCGGAACCGGUGAGUACAC | 1402 | 31478 | HCVa:159U21 sense siNA inv | B cAuGAGuGGccAAGGcGucTT B | 1637 |
| | | | | stab04 | | |
| 287 | AAAGGCCUUGUGGUACUGCCUGA | 1412 | 31479 | HCVa:287U21 sense siNA inv | B uccGucAuGGuGuuccGGATT B | 1638 |
| | | | | stab04 | | |
| 291 | GCCUUGUGGUACUGCCUGAUAGG | 1403 | 31480 | HCVa:291U21 sense siNA inv | B AuAGuccGucAuGGuGuucTT B | 1639 |
| | | | | stab04 | | |
| 295 | UGUGGUACUGCCUGAUAGGGUGC | 1404 | 31481 | HCVa:295U21 sense siNA inv | B uGGGAuAGuccGucAuGGuTT B | 1640 |
| | | | | stab04 | | |
| 296 | GUGGUACUGCCUGAUAGGGUGCU | 1405 | 31482 | HCVa:296U21 sense siNA inv | B GuGGGAuAGuccGucAuGGTT B | 1641 |
| | | | | stab04 | | |
| 297 | UGGUACUGCCUGAUAGGGUGCUU | 1406 | 31483 | HCVa:297U21 sense siNA inv | B cGuGGGAuAGuccGucAuGTT B | 1642 |
| | | | | stab04 | | |
| 298 | GGUACUGCCUGAUAGGGUGCUUG | 1407 | 31484 | HCVa:298U21 sense siNA inv | B ucGuGGGAuAGuccGucAuTT B | 1643 |
| | | | | stab04 | | |
| 300 | UACUGCCUGAUAGGGUGCUUGCG | 1408 | 31485 | HCVa:300U21 sense siNA inv | B GuucGuGGGAuAGuccGucTT B | 1644 |
| | | | | stab04 | | |
| 301 | AGUGCCUGAUAGGGUGCUUGCGA | 1409 | 31486 | HCVa:301U21 sense siNA inv | B cGuucGuGGGAuAGuccGuTT B | 1645 |
| | | | | stab04 | | |
| 303 | UGCCUGAUAGGGUGCUUGCGAGU | 1410 | 31487 | HCVa:303U21 sense siNA inv | B AGcGuucGuGGGAuAGuccTT B | 1646 |
| | | | | stab04 | | |
| 306 | CUGAUAGGGUGCUUGCGAGUGCC | 1411 | 31488 | HCVa:306U21 sense siNA inv | B GuGAGcGuucGuGGGAuAGTT B | 1647 |
| | | | | stab04 | | |
| 153 | AUAGUGGUCUGCGGAACCGGUGA | 1401 | 31489 | HCVa:171L21 antisense siNA | ucAccAGAcGccuuGGccATsT | 1648 |
| | | | | (153C) inv stab05 | | |
| 159 | GUCUGCGGAACCGGUGAGUACAC | 1402 | 31490 | HCVa:177L21 antisense siNA | GacGccuuGGccAcucAuGTsT | 1649 |
| | | | | (159C) inv stab05 | | |
| 287 | AAAGGCCUUGUGGUACUGCCUGA | 1412 | 31491 | HCVa:305L21 antisense siNA | uccGGAAcAccAuGAcGGATsT | 1650 |
| | | | | (287C) inv stab05 | | |
| 291 | GCCUUGUGGUACUGCCUGAUAGG | 1403 | 31492 | HCVa:309L21 antisense siNA | GAAcAccAuGAcGGAcuAuTsT | 1651 |
| | | | | (291C) inv stab05 | | |
| 295 | UGUGGUACUGCCUGAUAGGGUGC | 1404 | 31493 | HCVa:313L21 antisense siNA | AccAuGAcGGAcuAucccATsT | 1652 |
| | | | | (295C) inv stab05 | | |
| 296 | GUGGUACUGCCUGAUAGGGUGCU | 1405 | 31494 | HCVa:314L21 antisense siNA | ccAuGAcGGAcuAucccAcTsT | 1653 |
| | | | | (296C) inv stab05 | | |
| 297 | UGGUACUGCCUGAUAGGGUGCUU | 1406 | 31495 | HCVa:315L21 antisense siNA | cAuGAcGGAcuAucccAcGTsT | 1654 |
| | | | | (297C) inv stab05 | | |
| 298 | GGUACUGCCUGAUAGGGUGCUUG | 1407 | 31496 | HCVa:316L21 antisense siNA | AuGAcGGAcuAucccAcGATsT | 1655 |
| | | | | (298C) inv stab05 | | |
| 300 | UACUGCCUGAUAGGGUGCUUGCG | 1408 | 31497 | HCVa:318L21 antisense siNA | GAcGGAcuAucccAcGAAcTsT | 1656 |
| | | | | (300C) inv stab05 | | |
| 301 | ACUGCCUGAUAGGGUGCUUGCGA | 1409 | 31498 | HCVa:319L21 antisense siNA | AcGGAcuAucccAcGAAcGTsT | 1657 |
| | | | | (301C) inv stab05 | | |
| 303 | UGCCUGAUAGGGUGCUUGCGAGU | 1410 | 31499 | HCVa:321L21 antisense siNA | GGAcuAucccAcGAAcGcuTsT | 1658 |
| | | | | (303C) inv stab05 | | |
| 306 | CUGAUAGGGUGCUUGCGAGUGCC | 1411 | 31500 | HCVa:324L21 antisense siNA | cuAucccAcGAAcGcucAcTsT | 1659 |
| | | | | (306C) inv stab05 | | |
| 190 | GGGUCCUUUCUUGGAUCAACCCG | 1413 | 31659 | HCVb:190U21 sense siNA | B GuccuuucuuGGAucAAccTT B | 1660 |
| | | | | stab04 | | |
| 191 | GGUCCUUUCUUGGAUCAACCCGC | 1393 | 31660 | HCVb:191U21 sense siNA | B uccuuucuuGGAucAAcccTT B | 1661 |
| | | | | stab04 | | |
| 189 | CGGGUCCUUUCUUGGAUCAACCC | 1414 | 31661 | HCVb:189U21 sense siNA | B GGuccuuucuuGGAucAAcTT B | 1662 |
| | | | | stab04 | | |
| 186 | GACCGGGUCCUUUCUUGGAUCAA | 1415 | 31662 | HCVb:186U21 sense siNA | B ccGGGuccuuucuuGGAucTT B | 1663 |
| | | | | stab04 | | |
| 190 | GGGUCCUUUCUUGGAUCAACCCG | 1413 | 31663 | HCVb:208L21 antisense siNA | GGuuGAuccAAGAAAGGAcTsT | 1664 |
| | | | | (190C) stab05 | | |
| 191 | GGUCCUUUCUUGGAUCAACCCGC | 1393 | 31664 | HCVb:209L21 antisense siNA | GGGuuGAuccAAGAAAGGATsT | 1665 |
| | | | | (191C) stab05 | | |
| 189 | CGGGUCCUUUCUUGGAUCAACCC | 1414 | 31665 | HCVb:207L21 antisense siNA | GuuGAuccAAGAAAGGAccTsT | 1666 |
| | | | | (189C) stab05 | | |
| 186 | GACCGGGUCCUUUCUUGGAUCAA | 1415 | 31666 | HCVb:204L21 antisense siNA | GAucCAAGAAAGGAcccGGTsT | 1667 |
| | | | | (186C) stab05 | | |
| 190 | GGGUCCUUUCUUGGAUCAACCCG | 1413 | 31667 | HCVb:190U21 sense siNA inv | B ccAAcuAGGuucuuuccuGTT B | 1668 |
| | | | | stab04 | | |
| 191 | GGUCCUUUCUUGGAUCAACCCGC | 1393 | 31668 | HCVb:191U21 sense siNA inv | B cccAAcuAGGuucuuuccuTT B | 1669 |
| | | | | stab04 | | |
| 189 | CGGGUCCUUUCUUGGAUCAACCC | 1414 | 31669 | HCVb:189U21 sense siNA inv | B cAAcuAGGuucuuuccuGGTT B | 1670 |
| | | | | stab04 | | |
| 186 | GACCGGGUCCUUUCUUGGAUCAA | 1415 | 31670 | HCVb:186U21 sense siNA inv B cuAGGuucuuuccuGGGccTT B | 1671 | |
| | | | | stab04 | | |
| 190 | GGGUCCUUUCUUGGAUCAACCCG | 1413 | 31671 | HCVb:208L21 antisense siNA | cAGGAAAGAAccuAGuuGGTsT | 1672 |
| | | | | (190C) inv stab05 | | |
| 191 | GGUCCUUUCUUGGAUCAACCCGC | 1393 | 31672 | HCVb:209L21 antisense siNA | AGGAAAGAAccuAGuuGGGTsT | 1673 |
| | | | | (191C) inv stab05 | | |
| 189 | CGGGUCCUUUCUUGGAUCAACCC | 1414 | 31673 | HCVb:207L21 antisense siNA | cCAGGAAAGAAccuAGuuGTsT | 1674 |
| | | | | (189C) inv stab05 | | |
| 186 | GACCGGGUCCUUUCUUGGAUCAA | 1415 | 31674 | HCVb:204L21 antisense siNA | GGcccAGGAAAGAAccuAGTsT | 1675 |
| | | | | (186C) inv stab05 | | |
| 326 | GCCCCGGGAGGUCUCGUAGACCG | 1416 | 31702 | HCVa:326U21 sense siNA | B cccGGGAGGucucGuAGAcTT B | 1676 |
| | | | | stab07 | | |
| 327 | CCCCGGGAGGUCUCGUAGACCGU | 1417 | 31703 | HCVa:327U21 sense siNA | B ccGGGAGGucucGuAGAccTT B | 1677 |
| | | | | stab07 | | |
| 328 | CCCGGGAGGUCUCGUAGACCGUG | 1418 | 31704 | HCVa:328U21 sense siNA | B cGGGAGGucucGuAGAccGTT B | 1678 |
| | | | | stab07 | | |
| 329 | CCGGGAGGUCUCGUAGACCGUGC | 1419 | 31705 | HCVa:329U21 sense siNA | B GGGAGGucucGuAGAccGuTT B | 1679 |
| | | | | stab07 | | |
| 326 | GCCCCGGGAGGUCUCGUAGACCG | 1416 | 31706 | HCVa:344L21 antisense siNA | GucuAcGAGAccucccGGGTsT | 1680 |
| | | | | (326C) stab08 | | |
| 327 | CCCCGGGAGGUCUCGUAGACCGU | 1417 | 31707 | HCVa:345L21 antisense siNA | GGucuAcGAGAccucccGGTsT | 1681 |
| | | | | (327C) stab08 | | |
| 328 | CCCGGGAGGUCUCGUAGACCGUG | 1418 | 31708 | HCVa:346L21 antisense siNA | cGGucuAcGAGAccucccGTsT | 1682 |
| | | | | (328C) stab08 | | |
| 329 | CCGGGAGGUCUCGUAGACCGUGC | 1419 | 31709 | HCVa:347L21 antisense siNA | AcGGucuAcGAGAccucccTsT | 1683 |
| | | | | (329C) stab08 | | |
| 326 | GCCCCGGGAGGUCUCGUAGACCG | 1416 | 31710 | HCVa:326U21 sense siNA inv | B cAGAuGcucuGGAGGGcccTT B | 1684 |
| | | | | stab07 | | |
| 327 | CCCCGGGAGGUCUCGUAGACCGU | 1417 | 31711 | HCVa:327U21 sense siNA inv | B ccAGAuGcucuGGAGGGccTT B | 1685 |
| | | | | stab07 | | |
| 328 | CCCGGGAGGUCUCGUAGACCGUG | 1418 | 31712 | HCVa:328U21 sense siNA inv | B GccAGAuGcucuGGAGGGcTT B | 1686 |
| | | | | stab07 | | |
| 329 | CCGGGAGGUCUCGUAGACCGUGC | 1419 | 31713 | HCVa:329U21 sense siNA inv | B uGccAGAuGcucuGGAGGGTT B | 1687 |
| | | | | stab07 | | |
| 326 | GCCCCGGGAGGUCUCGUAGACCG | 1416 | 31714 | HCVa:344L21 antisense siNA | GGGcccuccAGAGcAucuGTsT | 1688 |
| | | | | (326C) inv stab08 | | |
| 327 | CCCCGGGAGGUCUCGUAGACCGU | 1417 | 31715 | HCVa:345L21 antisense siNA | GGcccuccAGAGcAucuGGTsT | 1689 |
| | | | | (327C) inv stab08 | | |
| 328 | CCCGGGAGGUCUCGUAGACCGUG | 1418 | 31716 | HCVa:346L21 antisense siNA | GcccuccAGAGcAucuGGcTsT | 1690 |
| | | | | (328C) inv stab08 | | |
| 329 | CCGGGAGGUCUCGUAGACCGUGC | 1419 | 31717 | HCVa:347L21 antisense siNA | cccuccAGAGcAucuGGcATsT | 1691 |
| | | | | (329C) inv stab08 | | |
| 291 | GCCUUGUGGUACUGCCUGAUAGG | 1403 | 31762 | HCVa:291U21 sense siNA | cuuGuGGuAcuGccuGAuATsT | 1692 |
| | | | | stab08 | | |
| 295 | UGUGGUACUGCCUGAUAGGGUGC | 1404 | 31763 | HCVa:295U21 sense siNA | uGGuAcuGccuGAuAGGGuTsT | 1693 |
| | | | | stab08 | | |
| 325 | UGCCCCGGGAGGUCUCGUAGACC | 1394 | 31764 | HCVa:325U21 sense siNA | ccccGGGAGGucucGuAGATsT | 1694 |
| | | | | stab08 | | |
| 291 | GCCUUGUGGUACUGCCUGAUAGG | 1403 | 31765 | HCVa:291U21 sense siNA | AuAGuccGucAuGGuGuucTsT | 1695 |
| | | | | inv stab08 | | |
| 295 | UGUGGUACUGCCUGAUAGGGUGC | 1404 | 31766 | HCVa:295U21 sense siNA | uGGGAuAGuccGucAuGGuTsT | 1696 |
| | | | | inv stab08 | | |
| 325 | UGCCCCGGGAGGUCUCGUAGACC | 1394 | 31767 | HCVa:325U21 sense siNA | AGAuGcucuGGAGGGccccTsT | 1697 |
| | | | | inv stab08 | | |
| 327 | CCCCGGGAGGUCUCGUAGACCGU | 1417 | 31928 | HCVa:327U21 sense siNA | ccGGGAGGucucGuAGAccTsT | 1698 |
| | | | | stab08 | | |
| 327 | CCCCGGGAGGUCUCGUAGACCGU | 1417 | 31929 | HCVa:327U21 sense siNA | ccAGAuGcucuGGAGGGccTsT | 1699 |
| | | | | inv stab08 | | |
| 328 | CCCGGGAGGUCUCGUAGACCGUG | 1418 | 31930 | HCVa:328U21 sense siNA | cGGGAGGucucGuAGAccGTsT | 1700 |
| | | | | stab08 | | |
| 328 | CCCGGGAGGUCUCGUAGACCGUG | 1418 | 31931 | HCVa:328U21 sense siNA | GccAGAuGcucuGGAGGGcTsT | 1701 |
| | | | | inv stab08 | | |
| 327 | CCCCGGGAGGUCUCGUAGACCGU | 1417 | 32007 | HCVa:327U21 sense siNA | B ccGGGAGGucucGuAGAccTsT | 1702 |
| | | | | stab08 + 5′ abasic | | |
| 327 | CCCCGGGAGGUCUCGUAGACCGU | 1417 | 32008 | HCVa:327U21 sense siNA | ccGGGAGGucucGuAGAccTsT B | 1703 |
| | | | | stab08 + 3′ abasic | | |
| 327 | CCCCGGGAGGUCUCGUAGACCGU | 1417 | 32009 | HCVa:327U21 sense siNA | B ccGGGAGGucucGuAGAccTsT B | 1704 |
| | | | | stab08 + 5′ & 3 abasic | | |
| 327 | CCCCGGGAGGUCUCGUAGACCGU | 1417 | 32174 | HCVa:327 siNA 3′-classl | UCUCGUAGACCUUGGUCUACGAGACCUCC | 1705 |
| | | | | 10 bp | CGGTT | |
| 327 | CCCCGGGAGGUCUCGUAGACCGU | 1417 | 32175 | HCVa:327 siNA 3-classl | UCGUAGACCUUGGUCUACGAGACCUCCCG | 1706 |
| | | | | 8 bp | GTT | |
| 327 | CCCCGGGAGGUCUCGUAGACCGU | 1417 | 32176 | HCVa:327 siNA 3-classl | GUAGACCUU GGUCUACGAGACCUCCCGG | 1707 |
| | | | | 6 bp | TT | |
| 327 | CCCCGGGAGGUCUCGUAGACCGU | 1417 | 32177 | HCVa:327 siNA 3-classl | AGACCUU GGUCUACGAGACCUCCCGGTT | 1708 |
| | | | | 4 bp | | |
| 327 | CCCCGGGAGGUCUCGUAGACCGU | 1417 | 32178 | HCVa:327 siNA 5-classl | GGUCUACGAGACCUCCCGGUUCCGGGAGG | 1709 |
| | | | | 10 bp | UCU | |
| 327 | CCCCGGGAGGUCUCGUAGACCGU | 1417 | 32179 | HCVa:327 siNA 5-classl | GGUCUACGAGACCUCCCGGUUCCGGGAGG | 1710 |
| | | | | 8 bp | U | |
| 327 | CCCCGGGAGGUCUCGUAGACCGU | 1417 | 32180 | HCVa:327 siNA 5-classl | GGUCUACGAGACCUCCCGGUU CCGGGAG | 1711 |
| | | | | 6 bp | | |
| 327 | CCCCGGGAGGUCUCGUAGACCGU | 1417 | 32181 | HCVa:327 siNA 5′-classl | GGUCUACGAGACCUCCCGGUU CCGGG | 1712 |
| | | | | 4 bp | | |
| 327 | CCCCGGGAGGUCUCGUAGACCGU | 1417 | 32182 | HCVa:327 siNA 3′-gaaa | CUCGUAGACC GAAAGGUCUACGAGACCU | 1713 |
| | | | | 10 bp | CCCGGTT | |
| 327 | CCCCGGGAGGUCUCGUAGACCGU | 1417 | 32183 | HCVa:327 siNA 3′-gaaa | CGUAGACC GAAAGGUCUACGAGACCUCC | 1714 |
| | | | | 8 bp | CGGTT | |
| 327 | CCCCGGGAGGUCUCGUAGACCGU | 1417 | 32184 | HCVa:327 siNA 3′-gaaa | UAGACC GAAAGGUCUACGAGACCUCCCG | 1715 |
| | | | | 6 bp | GTT | |
| 327 | CCCCGGGAGGUCUCGUAGACCGU | 1417 | 32185 | HCVa:327 siNA 3′-gaaa | GACC GAAA GGUCUACGAGACCUCCCGG | 1716 |
| | | | | 4 bp | TT | |
| 327 | CCCCGGGAGGUCUCGUAGACCGU | 1417 | 32186 | HCVa:327 siNA 5′-gaaa | GGUCUACGAGACCUCCCGGUU GAAACCG | 1717 |
| | | | | 10 bp | GGAGGUC | |
| 327 | CCCCGGGAGGUCUCGUAGACCGU | 1417 | 32187 | HCVa:327 siNA 5′-gaaa | GGUCUACGAGACCUCCCGGUU GAAACCG | 1718 |
| | | | | 8 bp | GGAGG | |
| 327 | CCCCGGGAGGUCUCGUAGACCGU | 1417 | 32188 | HCVa:327 siNA 5′-gaaa | GGUCUACGAGACCUCCCGGUU GAAACCG | 1719 |
| | | | | 6 bp | GGA | |
| 327 | CCCCGGGAGGUCUCGUAGACCGU | 1417 | 32189 | HCVa:327 siNA 5′-gaaa | GGUCUACGAGACCUCCCGGUU GAAA CC | 1720 |
| | | | | 4 bp | GG | |
| 327 | CCCCGGGAGGUCUCGUAGACCGU | 1417 | 32190 | HCVa:327 siNA 3′-uuuguguag | CGUAGACCUU UUUGUGUAGGGUCUACGA | 1721 |
| | | | | 10 bp | GACCUCCCGGU | |
| 327 | CCCCGGGAGGUCUCGUAGACCGU | 1417 | 32191 | HCVa:327 siNA 3′-uuuguguag | UAGACCUU UUUGUGUAG | 1722 |
| | | | | 8 bp | GGUCUACGAGACCUCCCGGU | |
| 327 | CCCCGGGAGGUCUCGUAGACCGU | 1417 | 32192 | HCVa:327 siNA 3′-uuuguguag | GACCUU UUUGUGUAG | 1723 |
| | | | | 6 bp GGUCUACGAGACCUCCCGGTT | | |
| 327 | CCCCGGGAGGUCUCGUAGACCGU | 1417 | 32193 | HCVa:327 siNA 3′-uuuguguag | CCUU UUUGUGUAG | 1724 |
| | | | | 4 bp | GGUCUACGAGACCUCCCGGTT | |
| 327 | CCCCGGGAGGUCUCGUAGACCGU | 1417 | 32194 | HCVa:327 siNA 5′-uuuguguag | GGUCUACGAGACCUCCCGGUU UUUGUGU | 1725 |
| | | | | 10 bp | AGCCGGGAGGUC | |
| 327 | CCCCGGGAGGUCUCGUAGACCGU | 1417 | 32195 | HCVa:327 siNA 5′-uuuguguag | GGUCUACGAGACCUCCCGGUU UUUGUGU | 1726 |
| | | | | 8 bp | AGCCGGGAGG | |
| 327 | CCCCGGGAGGUCUCGUAGACCGU | 1417 | 32196 | HCVa:327 siNA 5′-uuuguguag | GGUCUACGAGACCUCCCGGUU UUUGUGU | 1727 |
| | | | | 6 bp | AGCCGGGA | |
| 327 | CCCCGGGAGGUCUCGUAGACCGU | 1417 | 32197 | HCVa:327 siNA 5′-uuuguguag | GGUCUACGAGACCUCCCGGUU UUUGUGU | 1728 |
| | | | | 4 bp | AGCCGG | |
| 327 | CCCCGGGAGGUCUCGUAGACCGU | 1417 | 32198 | HCVa:345L21 antisense | GGucuAcGAGAccucccGGTsT | 1729 |
| | | | | (327C) stab05 siNA | | |
| 327 | CCCCGGGAGGUCUCGUAGACCGU | 1417 | 32199 | HCVa:345L21 antisense | pGGucuAcGAGAccucccGGTsT | 1730 |
| | | | | (327C) stab05 5′p siNA | | |
| 327 | CCCCGGGAGGUCUCGUAGACCGU | 1417 | 32200 | HCVa:345L21 antisense | sGGucuAcGAGAccucccGGTsT | 1731 |
| | | | | (327C) stab05 5′ps siNA | | |
| 327 | CCCCGGGAGGUCUCGUAGACCGU | 1417 | 32201 | HCVa:345L21 antisense | GGUCUACGAGACCUCCCGGU | 1732 |
| | | | | (327C) stab00 siNA | | |
| 327 | CCCCGGGAGGUCUCGUAGACCGU | 1417 | 32202 | HCVa:345L21 antisense | pGGUCUACGAGACCUCCCGGTT | 1733 |
| | | | | (327C) v1 5′p siNA | | |
| 327 | CCCCGGGAGGUCUCGUAGACCGU | 1417 | 32203 | HCVa:345L21 antisense | sGGUCUACGAGACCUCCCGGTT | 1734 |
| | | | | (327C) v1 5′ps siNA | | |
| 327 | CCCCGGGAGGUCUCGUAGACCGU | 1417 | 32204 | HCVa:345121 antisense | pGGUCUACGAGACCUCCCGGGGTT | 1735 |
| | | | | (327C) v2 5′p siNA | | |
| 327 | CCCCGGGAGGUCUCGUAGACCGU | 1417 | 32205 | HCVa:345121 antisense | pGGUCUACGAGACCUCCCGG UCUCGUA u B | 1736 |
| | | | | (327C) v3 5′p siNA | | |
| 327 | CCCCGGGAGGUCUCGUAGACCGU | 1417 | 32206 | HCVa:345121 antisense | pGGUCUACGAGACCUCCCGG AGGUCUCGUA | 1737 |
| | | | | (327C) v4 5′p siNA | uu B | |
| 327 | CCCCGGGAGGUCUCGUAGACCGU | 1417 | 32207 | HCVa:345121 antisense | pGGUCUACGAGACCUCCCGGTT UCUCGUA | 1738 |
| | | | | (327C) v5 5′p siNA | u B | |
| 327 | CCCCGGGAGGUCUCGUAGACCGU | 1417 | 32208 | HCVa:345121 antisense | pGGUCUACGAGACCUCCCGGTT | 1739 |
| | | | | (327C) v6 5′p siNA | AGGUCUCGUA u B | |
| 327 | CCCCGGGAGGUCUCGUAGACCGU | 1417 | 32501 | HCVa:327U21 sense siNA | B ccGGGAGGucucGuAGAccTT B | 1740 |
| | | | | stab04 | | |
| 325 | UGCCCCGGGAGGUCUCGUAGACC | 1394 | 32502 | HCVa:325U21 sense siNA | B CCCCGGGAGGUCUCGUAGATT B | 1741 |
| | | | | stab09 | | |
| 326 | GCCCCGGGAGGUCUCGUAGACCG | 1416 | 32503 | HCVa:326U21 sense siNA | B CCCGGGAGGUCUCGUAGACTT B | 1742 |
| | | | | stab09 | | |
| 327 | CCCCGGGAGGUCUCGUAGACCGU | 1417 | 32504 | HCVa:327U21 sense siNA | B CCGGGAGGUCUCGUAGACCTT B | 1743 |
| | | | | stab09 | | |
| 328 | CCCGGGAGGUCUCGUAGACCGUG | 1418 | 32505 | HCVa:328U21 sense siNA | B CGGGAGGUCUCGUAGACCGTT B | 1744 |
| | | | | stab09 | | |
| 329 | CCGGGAGGUCUCGUAGACCGUGC | 1419 | 32506 | HCVa:329U21 sense siNA | B GGGAGGUCUCGUAGACCGUTT B | 1745 |
| | | | | stab09 | | |
| 325 | UGCCCCGGGAGGUCUCGUAGACC | 1394 | 32507 | HCVa:343121 antisense siNA | UCUACGAGACCUCCCGGGGTsT | 1746 |
| | | | | (325C) stab10 | | |
| 326 | GCCCCGGGAGGUCUCGUAGACCG | 1416 | 32508 | HCVa:344121 antisense siNA | GUCUACGAGACCUCCCGGGTsT | 1747 |
| | | | | (326C) stab10 | | |
| 327 | CCCCGGGAGGUCUCGUAGACCGU | 1417 | 32509 | HCVa:345121 antisense siNA | GGUCUACGAGACCUCCCGGTsT | 1748 |
| | | | | (327C) stab10 | | |
| 328 | CCCGGGAGGUCUCGUAGACCGUG | 1418 | 32510 | HCVa:346121 antisense siNA | CGGUCUACGAGACCUCCCGTsT | 1749 |
| | | | | (328C) stab10 | | |
| 329 | CCGGGAGGUCUCGUAGACCGUGC | 1419 | 32511 | HCVa:347121 antisense siNA | ACGGUCUACGAGACCUCCCTsT | 1750 |
| | | | | (329C) stab10 | | |
| 327 | CCCCGGGAGGUCUCGUAGACCGU | 1417 | 32512 | HCVa:327U21 sense siNA inv | B ccAGAuGcucuGGAGGGccTT B | 1751 |
| | | | | stab09 | | |
| 327 | CCCCGGGAGGUCUCGUAGACCGU | 1417 | 32513 | HCVa:345L21 antisense siNA | GGcccuccAGAGcAucuGGTsT | 1752 |
| | | | | (327C) inv stab05 | | |
| 325 | UGCCCCGGGAGGUCUCGUAGACC | 1394 | 32514 | HCVa:325U21 sense siNA inv | B AGAUGCUCUGGAGGGCCCCTT B | 1753 |
| | | | | stab09 | | |
| 326 | GCCCCGGGAGGUCUCGUAGACCG | 1416 | 32515 | HCVa:326U21 sense siNA inv | B CAGAUGCUCUGGAGGGCCCTT B | 1754 |
| | | | | stab09 | | |
| 327 | CCCCGGGAGGUCUCGUAGACCGU | 1417 | 32516 | HCVa:327U21 sense siNA inv | B CCAGAUGCUCUGGAGGGCCTT B | 1755 |
| | | | | stab09 | | |
| 328 | CCCGGGAGGUCUCGUAGACCGUG | 1418 | 32517 | HCVa:328U21 sense siNA inv | B GCCAGAUGCUCUGGAGGGCTT B | 1756 |
| | | | | stab09 | | |
| 329 | CCGGGAGGUCUCGUAGACCGUGC | 1419 | 32518 | HCVa:329U21 sense siNA inv | B UGCCAGAUGCUCUGGAGGGTT B | 1757 |
| | | | | stab09 | | |
| 325 | UGCCCCGGGAGGUCUCGUAGACC | 1394 | 32519 | HCVa:343L21 antisense siNA | GGGGCCCUCCAGAGCAUCUTsT | 1758 |
| | | | | (325C) inv stab10 | | |
| 326 | GCCCCGGGAGGUCUCGUAGACCG | 1416 | 32520 | HCVa:344L21 antisense siNA | GGGCCCUCCAGAGCAUCUGTsT | 1759 |
| | | | | (326C) inv stab10 | | |
| 327 | CCCCGGGAGGUCUCGUAGACCGU | 1417 | 32521 | HCVa:345L21 antisense siNA | GGCCCUCCAGAGCAUCUGGTsT | 1760 |
| | | | | (327C) inv stab10 | | |
| 328 | CCCGGGAGGUCUCGUAGACCGUG | 1418 | 32522 | HCVa:346L21 antisense siNA | GCCCUCCAGAGCAUCUGGCTsT | 1761 |
| | | | | (328C) inv stab10 | | |
| 329 | CCGGGAGGUCUCGUAGACCGUGC | 1419 | 32523 | HCVa:347L21 antisense siNA | CCCUCCAGAGCAUCUGGCATsT | 1762 |
| | | | | (329C) inv stab10 | | |
| 295 | UGUGGUACUGCCUGAUAGGGUGC | 1404 | 32714 | HCVa:313L21 antisense siNA | pACCCUAUCAGGCAGUACCA | 1763 |
| | | | | (295C) v1 5′p palindrome | GUACUGCCUGAU B | |
| 295 | UGUGGUACUGCCUGAUAGGGUGC | 1404 | 32715 | HCVa:313L21 antisense siNA | pACCCUAUCAGGCAGUACC | 1764 |
| | | | | (295C) v2 5′p palindrome | GGUACUGCCUGAU B | |
| 327 | CCCCGGGAGGUCUCGUAGACCGU | 1417 | 32716 | HCVa: 5′p-345L21 antisense | pGGUCUACGAGACCUCCCGG | 1765 |
| | | | | (327C) v5 5′p palindrome | AGGUCUCGUAGA B | |
| | | | | siNA | | |
| 327 | CCCCGGGAGGUCUCGUAGACCGU | 1417 | 32717 | HCVa: 5′p-345121 antisense | pGGUCUACGAGACCUCC | 1766 |
| | | | | (327C) v6 5′p palindrome | GGAGGUCUCGUA B | |
| | | | | siNA | | |
| 291 | GCCUUGUGGUACUGCCUGAUAGG | 1403 | 32796 | HCVa:309L21 antisense siNA | uAucAgGcaguaccAcaAgTsT | 1767 |
| | | | | (291C) stab08 mod pair to | | |
| | | | | #30651 | | |
| 295 | UGUGGUACUGCCUGAUAGGGUGC | 1404 | 32797 | HCVa:313L21 antisense siNA | acccuaucaggcaguAccaTsT | 1768 |
| | | | | (295C) stab08 mod pair to | | |
| | | | | #30652 | | |
| 303 | UGCCUGAUAGGGUGCUUGCGAGU | 1410 | 32798 | HCVa:321L21 antisense siNA | ucgcaaGcacccuAucaggTsT | 1769 |
| | | | | (303C) stab08 mod pair to | | |
| | | | | #30658 | | |
| 306 | CUGAUAGGGUGCUUGCGAGUGCC | 1411 | 32799 | HCVa:324L21 antisense siNA | cacucgcAagcacccuaucTsT | 1770 |
| | | | | (306C) stab08 mod A pair to | | |
| | | | | #30659 | | |
| 306 | CUGAUAGGGUGCUUGCGAGUGCC | 1411 | 32800 | HCVa:324L21 antisense siNA | cAcucgcAagcacccuaucTsT | 1771 |
| | | | | (306C) stab08 mod B pair to | | |
| | | | | #30659 | | |
| 140 | UCCCGGGAGAGCCAUAGUGGUCU | 1420 | 33125 | HCVa:140U21 sense siNA | B ccGGGAGAGccAuAGuGGuTT B | 1772 |
| | | | | stab07 | | |
| 141 | CCCGGGAGAGCCAUAGUGGUCUG | 1421 | 33126 | HCVa:141U21 sense siNA | B cGGGAGAGccAuAGuGGucTT B | 1773 |
| | | | | stab07 | | |
| 142 | CCGGGAGAGCCAUAGUGGUCUGC | 1422 | 33127 | HCVa:142U21 sense siNA | B GGGAGAGccAuAGuGGucuTT B | 1774 |
| | | | | stab07 | | |
| 154 | UAGUGGUCUGCGGAACCGGUGAG | 1423 | 33128 | HCVa:154U21 sense siNA | B GuGGucuGcGGAAccGGuGTT B | 1775 |
| | | | | stab07 | | |
| 155 | AGUGGUCUGCGGAACCGGUGAGU | 1424 | 33129 | HCVa:155U21 sense siNA | B uGGucuGcGGAAccGGuGATT B | 1776 |
| | | | | stab07 | | |
| 156 | GUGGUCUGCGGAACCGGUGAGUA | 1425 | 33130 | HCVa:156U21 sense siNA | B GGucuGcGGAAccGGuGAGTT B | 1777 |
| | | | | stab07 | | |
| 157 | UGGUCUGCGGAACCGGUGAGUAC | 1426 | 33131 | HCVa:157U21 sense siNA | B GucuGcGGAAccGGuGAGuTT B | 1778 |
| | | | | stab07 | | |
| 158 | GGUCUGCGGAACCGGUGAGUACA | 1427 | 33132 | HCVa:158U21 sense siNA | B ucuGcGGAAccGGuGAGuATT B | 1779 |
| | | | | stab07 | | |
| 160 | UCUGCGGAACCGGUGAGUACACC | 1428 | 33133 | HCVa:160U21 sense siNA | B uGcGGAAccGGuGAGuAcATT B | 1780 |
| | | | | stab07 | | |
| 161 | CUGCGGAACCGGUGAGUACACCG | 1429 | 33134 | HCVa:161U21 sense siNA | B GcGGAAccGGuGAGuAcAcTT B | 1781 |
| | | | | stab07 | | |
| 164 | CGGAACCGGUGAGUACACCGGAA | 1430 | 33135 | HCVa:164U21 sense siNA | B GAAccGGuGAGuAcAccGGTT B | 1782 |
| | | | | stab07 | | |
| 165 | GGAACCGGUGAGUACACCGGAAU | 1431 | 33136 | HCVa:165U21 sense siNA | B AAccGGuGAGuAcAccGGATT B | 1783 |
| | | | | stab07 | | |
| 166 | GAACCGGUGAGUACACCGGAAUU | 1432 | 33137 | HCVa:166U21 sense siNA | B AccGGuGAGuAcAccGGAATT B | 1784 |
| | | | | stab07 | | |
| 167 | AACCGGUGAGUACACCGGAAUUG | 1433 | 33138 | HCVa:167U21 sense siNA | B ccGGuGAGuAcAccGGAAuTT B | 1785 |
| | | | | stab07 | | |
| 282 | UCGCGAAAGGCCUUGUGGUACUG | 1434 | 33139 | HCVa:282U21 sense siNA | B GcGAAAGGccuuGuGGuAcTT B | 1786 |
| | | | | stab07 | | |
| 283 | CGCGAAAGGCCUUGUGGUACUGC | 1435 | 33140 | HCVa:283U21 sense siNA | B cGAAAGGccuuGuGGuAcuTT B | 1787 |
| | | | | stab07 | | |
| 284 | GCGAAAGGCCUUGUGGUACUGCC | 1436 | 33141 | HCVa:284U21 sense siNA | B GAAAGGccuuGuGGuAcuGTT B | 1788 |
| | | | | stab07 | | |
| 285 | CGAAAGGCCUUGUGGUACUGCCU | 1437 | 33142 | HCVa:285U21 sense siNA | B AAAGGccuuGuGGuAcuGcTT B | 1789 |
| | | | | stab07 | | |
| 286 | GAAAGGCCUUGUGGUACUGCCUG | 1438 | 33143 | HCVa:286U21 sense siNA | B AAGGccuuGuGGuAcuGccTT B | 1790 |
| | | | | stab07 | | |
| 288 | AAGGCCUUGUGGUACUGCCUGAU | 1439 | 33144 | HCVa:288U21 sense siNA | B GGccuuGuGGuAcuGccuGTT B | 1791 |
| | | | | stab07 | | |
| 289 | AGGCCUUGUGGUACUGCCUGAUA | 1440 | 33145 | HCVa:289U21 sense siNA | B GccuuGuGGuAcuGccuGATT B | 1792 |
| | | | | stab07 | | |
| 290 | GGCCUUGUGGUACUGCCUGAUAG | 1441 | 33146 | HCVa:290U21 sense siNA | B ccuuGuGGuAcuGccuGAuTT B | 1793 |
| | | | | stab07 | | |
| 299 | GUACUGCCUGAUAGGGUGCUUGC | 1442 | 33147 | HCVa:299U21 sense siNA | B AcuGccuGAuAGGGuGcuuTT B | 1794 |
| | | | | stab07 | | |
| 302 | CUGCCUGAUAGGGUGCUUGCGAG | 1443 | 33148 | HCVa:302U21 sense siNA | B GccuGAuAGGGuGcuuGcGTT B | 1795 |
| | | | | stab07 | | |
| 304 | GCCUGAUAGGGUGCUUGCGAGUG | 1444 | 33149 | HCVa:304U21 sense siNA | B cuGAuAGGGuGcuuGcGAGTT B | 1796 |
| | | | | stab07 | | |
| 305 | CCUGAUAGGGUGCUUGCGAGUGC | 1445 | 33150 | HCVa:305U21 sense siNA | B uGAuAGGGuGcuuGcGAGuTT B | 1797 |
| | | | | stab07 | | |
| 307 | UGAUAGGGUGCUUGCGAGUGCCC | 1446 | 33151 | HCVa:307U21 sense siNA | B AuAGGGuGcuuGcGAGuGcTT B | 1798 |
| | | | | stab07 | | |
| 308 | GAUAGGGUGCUUGCGAGUGCCCC | 1447 | 33152 | HCVa:308U21 sense siNA | B uAGGGuGcuuGcGAGuGccTT B | 1799 |
| | | | | stab07 | | |
| 310 | UAGGGUGCUUGCGAGUGCCCCGG | 1448 | 33153 | HCVa:310U21 sense siNA | B GGGuGcuuGcGAGuGccccTT B | 1800 |
| | | | | stab07 | | |
| 311 | AGGGUGCUUGCGAGUGCCCCGGG | 1449 | 33154 | HCVa:311U21 sense siNA | B GGuGcuuGcGAGuGccccGTT B | 1801 |
| | | | | stab07 | | |
| 314 | GUGCUUGCGAGUGCCCCGGGAGG | 1450 | 33155 | HCVa:314U21 sense siNA | B GcuuGcGAGuGccccGGGATT B | 1802 |
| | | | | stab07 | | |
| 315 | UGCUUGCGAGUGCCCCGGGAGGU | 1451 | 33156 | HCVa:315U21 sense siNA | B cuuGcGAGuGccccGGGAGTT B | 1803 |
| | | | | stab07 | | |
| 316 | GCUUGCGAGUGCCCCGGGAGGUC | 1452 | 33157 | HCVa:316U21 sense siNA | B uuGcGAGuGccccGGGAGGTT B | 1804 |
| | | | | stab07 | | |
| 317 | CUuGCGAGUGCCCCGGGAGGUCU | 1453 | 33158 | HCVa:317U21 sense siNA | B uGcGAGuGccccGGGAGGuTT B | 1805 |
| | | | | stab07 | | |
| 318 | UUGCGAGUGCCCCGGGAGGUCUC | 1454 | 33159 | HCVa:318U21 sense siNA | B GcGAGuGccccGGGAGGucTT B | 1806 |
| | | | | stab07 | | |
| 319 | UGCGAGUGCCCCGGGAGGUCUCG | 1455 | 33160 | HCVa:319U21 sense siNA | B cGAGuGccccGGGAGGucuTT B | 1807 |
| | | | | stab07 | | |
| 320 | GCGAGUGCCCCGGGAGGUCUCGU | 1456 | 33161 | HCVa:320U21 sense siNA | B GAGuGccccGGGAGGucucTT B | 1808 |
| | | | | stab07 | | |
| 322 | GAGUGCCCCGGGAGGUCUCGUAG | 1457 | 33162 | HCVa:322U21 sense siNA | B GuGccccGGGAGGucucGuTT B | 1809 |
| | | | | stab07 | | |
| 323 | AGUGCCCCGGGAGGUCUCGUAGA | 1458 | 33163 | HCVa:323U21 sense siNA | B uGccccGGGAGGucucGuATT B | 1810 |
| | | | | stab07 | | |
| 330 | CGGGAGGUCUCGUAGACCGUGCA | 1459 | 33164 | HCVa:330U21 sense siNA | B GGAGGucucGuAGAccGuGTT B | 1811 |
| | | | | stab07 | | |
| 140 | UCCCGGGAGAGCCAUAGUGGUCU | 1420 | 33165 | HCVa:158L21 antisense siNA | AccAcuAuGGcucucccGGTsT | 1812 |
| | | | | (140C) stab08 | | |
| 141 | CCCGGGAGAGCCAUAGUGGUCUG | 1421 | 33166 | HCVa:159L21 antisense siNA | GaccAcuAuGGcucucccGTsT | 1813 |
| | | | | (141C) stab08 | | |
| 142 | CCGGGAGAGCCAUAGUGGUCUGC | 1422 | 33167 | HCVa:160L21 antisense siNA | AGAccAcuAuGGcucucccTsT | 1814 |
| | | | | (142C) stab08 | | |
| 154 | UAGUGGUCUGCGGAACCGGUGAG | 1423 | 33168 | HCVa:172L21 antisense siNA | cAccGGuuccGcAGAccAcTsT | 1815 |
| | | | | (154C) stab08 | | |
| 155 | AGUGGUCUGCGGAACCGGUGAGU | 1424 | 33169 | HCVa:173L21 antisense siNA | ucAccGGuuccGcAGAccATsT | 1816 |
| | | | | (155C) stab08 | | |
| 156 | GUGGUCUGCGGAACCGGUGAGUA | 1425 | 33170 | HCVa:174L21 antisense siNA | cucAccGGuuccGcAGAccTsT | 1817 |
| | | | | (156C) stab08 | | |
| 157 | UGGUCUGCGGAACCGGUGAGUAC | 1426 | 33171 | HCVa:175L21 antisense siNA | AcucAccGGuuccGcAGAcTsT | 1818 |
| | | | | (157C) stab08 | | |
| 158 | GGUCUGCGGAACCGGUGAGUACA | 1427 | 33172 | HCVa:176L21 antisense siNA | uAcucAccGGuuccGcAGATsT | 1819 |
| | | | | (158C) stab08 | | |
| 160 | UCUGCGGAACCGGUGAGUACACC | 1428 | 33173 | HCVa:178L21 antisense siNA | uGuAcucAccGGuuccGcATsT | 1820 |
| | | | | (160C) stab08 | | |
| 161 | CUGCGGAACCGGUGAGUACACCG | 1429 | 33174 | HCVa:179L21 antisense siNA | GuGuAcucAccGGuuccGcTsT | 1821 |
| | | | | (161C) stab08 | | |
| 164 | CGGAACCGGUGAGUACACCGGAA | 1430 | 33175 | HCVa:182L21 antisense siNA | ccGGuGuAcucAccGGuucTsT | 1822 |
| | | | | (164C) stab08 | | |
| 165 | GGAACCGGUGAGUACACCGGAAU | 1431 | 33176 | HCVa:183L21 antisense siNA | uccGGuGuAcucAccGGuuTsT | 1823 |
| | | | | (165C) stab08 | | |
| 166 | GAACCGGUGAGUACACCGGAAUU | 1432 | 33177 | HCVa:184L21 antisense siNA | uuccGGuGuAcucAccGGuTsT | 1824 |
| | | | | (166C) stab08 | | |
| 167 | AACCGGUGAGUACACCGGAAUUG | 1433 | 33178 | HCVa:185L21 antisense siNA | AuuccGGuGuAcucAccGGTsT | 1825 |
| | | | | (167C) stab08 | | |
| 282 | UCGCGAAAGGCCUUGUGGUACUG | 1434 | 33179 | HCVa:300L21 antisense siNA | GuAccAcAAGGccuuucGcTsT | 1826 |
| | | | | (282C) stab08 | | |
| 283 | CGCGAAAGGCCUUGUGGUACUGC | 1435 | 33180 | HCVa:301L21 antisense siNA | AGuAccAcAAGGccuuucGTsT | 1827 |
| | | | | (283C) stab08 | | |
| 284 | GCGAAAGGCCUUGUGGUACUGCC | 1436 | 33181 | HCVa:302L21 antisense siNA | cAGuAccAcAAGGccuuucTsT | 1828 |
| | | | | (284C) stab08 | | |
| 285 | CGAAAGGCCUUGUGGUACUGCCU | 1437 | 33182 | HCVa:303L21 antisense siNA | GcAGuAccAcAAGGccuuuTsT | 1829 |
| | | | | (285C) stab08 | | |
| 286 | GAAAGGCCUUGUGGUACUGCCUG | 1438 | 33183 | HCVa:304L21 antisense siNA | GGCAGuAccAcAAGGccuuTsT | 1830 |
| | | | | (286C) stab08 | | |
| 288 | AAGGCCUUGUGGUACUGCCUGAU | 1439 | 33184 | HCVa:306L21 antisense siNA | cAGGcAGuAccAcAAGGccTsT | 1831 |
| | | | | (288C) stab08 | | |
| 289 | AGGCCUUGUGGUACUGCCUGAUA | 1440 | 33185 | HCVa:307L21 antisense siNA | ucAGGcAGuAccAcAAGGcTsT | 1832 |
| | | | | (289C) stab08 | | |
| 290 | GGCCUUGUGGUACUGCCUGAUAG | 1441 | 33186 | HCVa:308L21 antisense siNA | AucAGGcAGuAccAcAAGGTsT | 1833 |
| | | | | (290C) stab08 | | |
| 299 | GUACUGCCUGAUAGGGUGCUUGC | 1442 | 33187 | HCVa:317L21 antisense siNA | AAGcAcccuAucAGGcAGuTsT | 1834 |
| | | | | (299C) stab08 | | |
| 302 | CUGCCUGAUAGGGUGCUUGCGAG | 1443 | 33188 | HCVa:320L21 antisense siNA | cGcAAGcAcccuAucAGGcTsT | 1835 |
| | | | | (302C) stab08 | | |
| 304 | GCCUGAUAGGGUGCUUGCGAGUG | 1444 | 33189 | HCVa:322L21 antisense siNA | cucGcAAGcAcccuAucAGTsT | 1836 |
| | | | | (304C) stab08 | | |
| 305 | CCUGAUAGGGUGCUUGCGAGUGC | 1445 | 33190 | HCVa:323L21 antisense siNA | AcucGcAAGcAcccuAucATsT | 1837 |
| | | | | (305C) stab08 | | |
| 307 | UGAUAGGGUGCUUGCGAGUGCCC | 1446 | 33191 | HCVa:325L21 antisense siNA | GcAcucGcAAGcAcccuAuTsT | 1838 |
| | | | | (307C) stab08 | | |
| 308 | GAUAGGGUGCUUGCGAGUGCCCC | 1447 | 33192 | HCVa:326L21 antisense siNA | GGcAcucGcAAGcAcccuATsT | 1839 |
| | | | | (308C) stab08 | | |
| 310 | UAGGGUGCUUGCGAGUGCCCCGG | 1448 | 33193 | HCVa:328L21 antisense siNA | GGGGcAcucGcAAGcAcccTsT | 1840 |
| | | | | (310C) stab08 | | |
| 311 | AGGGUGCUUGCGAGUGCCCCGGG | 1449 | 33194 | HCVa:329L21 antisense siNA | cGGGGcAcucGcAAGcAccTsT | 1841 |
| | | | | (311C) stab08 | | |
| 314 | GUGCUUGCGAGUGCCCCGGGAGG | 1450 | 33195 | HCVa:332L21 antisense siNA | ucccGGGGcAcucGcAAGcTsT | 1842 |
| | | | | (314C) stab08 | | |
| 315 | UGCUUGCGAGUGCCCCGGGAGGU | 1451 | 33196 | HCVa:333L21 antisense siNA | cucccGGGGcAcucGcAAGTsT | 1843 |
| | | | | (315C) stab08 | | |
| 316 | GCUUGCGAGUGCCCCGGGAGGUC | 1452 | 33197 | HCVa:334L21 antisense siNA | ccucccGGGGcAcucGcAATsT | 1844 |
| | | | | (316C) stab08 | | |
| 317 | CUUGCGAGUGCCCCGGGAGGUCU | 1453 | 33198 | HCVa:335L21 antisense siNA | AccucccGGGGcAcucGcATsT | 1845 |
| | | | | (317C) stab08 | | |
| 318 | UUGCGAGUGCCCCGGGAGGUCUC | 1454 | 33199 | HCVa:336L21 antisense siNA | GAccucccGGGGcAcucGcTsT | 1846 |
| | | | | (318C) stab08 | | |
| 319 | UGCGAGUGCCCCGGGAGGUCUCG | 1455 | 33200 | HCVa:337L21 antisense siNA | AGAccucccGGGGcAcucGTsT | 1847 |
| | | | | (319C) stab08 | | |
| 320 | GCGAGUGCCCCGGGAGGUCUCGU | 1456 | 33201 | HCVa:338L21 antisense siNA | GAGAccucccGGGGcAcucTsT | 1848 |
| | | | | (320C) stab08 | | |
| 322 | GAGUGCCCCGGGAGGUCUCGUAG | 1457 | 33202 | HCVa:340L21 antisense siNA | AcGAGAccucccGGGGcAcTsT | 1849 |
| | | | | (322C) stab08 | | |
| 323 | AGUGCCCCGGGAGGUCUCGUAGA | 1458 | 33203 | HCVa:341L21 antisense siNA | uAcGAGAccucccGGGGcATsT | 1850 |
| | | | | (323C) stab08 | | |
| 330 | CGGGAGGUCUCGUAGACCGUGCA | 1459 | 33204 | HCVa:348L21 antisense siNA | cAcGGucuAcGAGAccuccTsT | 1851 |
| | | | | (330C) stab08 | | |
| 303 | UGCCUGAUAGGGUGCUUGCGAGU | 1410 | 33329 | HCVa:321L21 antisense siNA | pucGcAAGcAcccuAucAGGTsT | 1852 |
| | | | | (303C) stab08 + 5′ P | | |
| 303 | UGCCUGAUAGGGUGCUUGCGAGU | 1410 | 33330 | HCVa:321L21 antisense siNA | pucGcAAGcAcccuAucAGGTsT | 1853 |
| | | | | (303C) stab05 + 5′ P | | |
| 295 | UGUGGUACUGCCUGAUAGGGUGC | 1404 | 33331 | HCVa:313L21 antisense siNA | AcccuAucAGGcAGuAccATsT | 1854 |
| | | | | (295C) stab05 + 5′ P | | |
| 295 | UGUGGUACUGCCUGAUAGGGUGC | 1404 | 33332 | HCVa:313L21 antisense siNA | pAcccuAucAGGcAGuAccATsT | 1855 |
| | | | | (295C) stab08 + 5′ P | | |
| 306 | CUGAUAGGGUGCUUGCGAGUGCC | 1411 | 33333 | HCVa:324L21 antisense siNA | pcAcucGcAAGcAcccuAucTsT | 1856 |
| | | | | (306C) stab08 + 5′ P | | |
| 327 | CCCCGGGAGGUCUCGUAGACCGU | 1417 | 33334 | HCVa:345L21 antisense siNA | pGGucuAcGAGAccucccGGTsT | 1857 |
| | | | | (327C) stab08 + 5′ P | | |
| 303 | UGCCUGAUAGGGUGCUUGCGAGU | 1410 | 33346 | HCVa:321L21 antisense siNA | L ucGcAAGcAcccuAucAGGTsT | 1858 |
| | | | | (303C) stab08 + 5′ aminoL | | |
| 303 | UGCCUGAUAGGGUGCUUGCGAGU | 1410 | 33347 | HCVa:321L21 antisense siNA | L ucGcAAGcAcccuAucAGGTsT | 1859 |
| | | | | (303C) stab05 + 5′ aminoL | | |
| 295 | UGUGGUACUGCCUGAUAGGGUGC | 1404 | 33348 | HCVa:313L21 antisense siNA | LAcccuAucAGGcAGuAccATsT | 1860 |
| | | | | (295C) stab05 + 5′ aminoL | | |
| 295 | UGUGGUACUGCCUGAUAGGGUGC | 1404 | 33349 | HCVa:313L21 antisense siNA | L AcccuAucAGGcAGuAccATsT | 1861 |
| | | | | (295C) stab08 + 5′ aminoL | | |
| 306 | CUGAUAGGGUGCUUGCGAGUGCC | 1411 | 33350 | HCVa:324L21 antisense siNA | L cAcucGcAAGcAcccuAucTsT | 1862 |
| | | | | (306C) stab08 + 5′ aminoL | | |
| 327 | CCCCGGGAGGUCUCGUAGACCGU | 1417 | 33351 | HCVa:345L21 antisense siNA | L GGucuAcGAGAccucccGGTsT | 1863 |
| | | | | (327C) stab08 + 5′ aminoL | | |
| 327 | CCCCGGGAGGUCUCGUAGACCGU | 1417 | 34024 | HCVa:327U21 sense siNA | B ccGAGAGGucGcGuAGuccTT B | 1864 |
| | | | | inact1 stab07 | | |
| 327 | CCCCGGGAGGUCUCGUAGACCGU | 1417 | 34025 | HCVa:327U21 sense siNA | B ccGAGAGGucGcGucGAucTT B | 1865 |
| | | | | inact2 stab07 | | |
| 327 | CCCCGGGAGGUCUCGUAGACCGU | 1417 | 34026 | HCVa:327U21 sense siNA | B ccGGuAGGucccGuGGAcATT B | 1866 |
| | | | | inact3 stab07 | | |
| 327 | CCCCGGGAGGUCUCGUAGACCGU | 1417 | 34027 | HCVa:345L21 antisense siNA | GGAcuAcGcGAccucucGGTsT | 1867 |
| | | | | (327C) inact1 stab08 | | |
| 327 | CCCCGGGAGGUCUCGUAGACCGU | 1417 | 34028 | HCVa:345L21 antisense siNA | GAucGAcGcGAccucucGGTsT | 1868 |
| | | | | (327C) inact2 stab08 | | |
| 327 | CCCCGGGAGGUCUCGUAGACCGU | 1417 | 34029 | HCVa:345L21 antisense siNA | uGuccAcGGGAccuAccGGTsT | 1869 |
| | | | | (327C) inact3 stab08 | | |
| 282 | UCGCGAAAGGCCUUGUGGUACUG | 1434 | 34030 | HCVa:282U21 sense siNA | B GcuAAAGGcGuuGuGGcAcTT B | 1870 |
| | | | | inact1 stab07 | | |
| 282 | UCGCGAAAGGCCUUGUGGUACUG | 1434 | 34031 | HCVa:282U21 sense siNA | B GcGuAAGGcccuGuGGuAATT B | 1871 |
| | | | | inact2 stab07 | | |
| 282 | UCGCGAAAGGCCUUGUGGUACUG | 1434 | 34032 | HCVa:282U21 sense siNA | B GAGAAAcGccuGGuGGuucTT B | 1872 |
| | | | | inact3 stab07 | | |
| 283 | CGCGAAAGGCCUUGUGGUACUGC | 1435 | 34033 | HCVa:283U21 sense siNA | B cGuAAGGcAuuGuGGcAcuTT B | 1873 |
| | | | | inact1 stab07 | | |
| 283 | CGCGAAAGGCCUUGUGGUACUGC | 1435 | 34034 | HCVa:283U21 sense siNA | B cGAGAGGcAuuGuGcuAcuTT B | 1874 |
| | | | | inact2 stab07 | | |
| 283 | CGCGAAAGGCCUUGUGGUACUGC | 1435 | 34035 | HCVa:283U21 sense siNA | B ccAAAGGucuuGAGGuGcuTT B | 1875 |
| | | | | inact3 stab07 | | |
| 304 | GCCUGAUAGGGUGCUUGCGAGUG | 1444 | 34036 | HCVa:304U21 sense siNA | B cGGAuAGGcuGcuuGuGAGTT B | 1876 |
| | | | | inact1 stab07 | | |
| 304 | GCCUGAUAGGGUGCUUGCGAGUG | 1444 | 34037 | HCVa:304U21 sense siNA | B cuGcuAGGGuAcuuGGGAGTT B | 1877 |
| | | | | inact2 stab07 | | |
| 304 | GCCUGAUAGGGUGCUUGCGAGUG | 1444 | 34038 | HCVa:304U21 sense siNA | B ccGAuAuGGuGAuuGcGGGTT B | 1878 |
| | | | | inact3 stab07 | | |
| 307 | UGAUAGGGUGCUUGCGAGUGCCC | 1446 | 34039 | HCVa:307U21 sense siNA | B AuuGGGuGcuGGcGAGuAcTT B | 1879 |
| | | | | inact1 stab07 | | |
| 307 | UGAUAGGGUGCUUGCGAGUGCCC | 1446 | 34040 | HCVa:307U21 sense siNA | B AuAuGGuGccuGcGAGuGGTT B | 1880 |
| | | | | inact2 stab07 | | |
| 307 | UGAUAGGGUGCUUGCGAGUGCCC | 1446 | 34041 | HCVa:307U21 sense siNA | B AGAGGGuAcuuGcGcGuGuTT B | 1881 |
| | | | | inact3 stab07 | | |
| 282 | UCGCGAAAGGCCUUGUGGUACUG | 1434 | 34042 | HCVa:300L21 antisense siNA | GuGccAcAAcGccuuuAGcTsT | 1882 |
| | | | | (282C) inact1 stab08 | | |
| 282 | UCGCGAAAGGCCUUGUGGUACUG | 1434 | 34043 | HCVa:300L21 antisense siNA | uuAccAcAGGGccuuAcGcTsT | 1883 |
| | | | | (282C) inact2 stab08 | | |
| 282 | UCGCGAAAGGCCUUGUGGUACUG | 1434 | 34044 | HCVa:300L21 antisense siNA | GAAccAccAGGcGuuucucTsT | 1884 |
| | | | | (282C) inact3 stab08 | | |
| 283 | CGCGAAAGGCCUUGUGGUACUGC | 1435 | 34045 | HCVa:301L21 antisense siNA | AguGccAcAAuGccuuAcGTsT | 1885 |
| | | | | (283C) inact1 stab08 | | |
| 283 | CGCGAAAGGCCUUGUGGUACUGC | 1435 | 34046 | HCVa:301121 antisense siNA | AguAGcAcAAuGccucucGTsT | 1886 |
| | | | | (283C) inact2 stab08 | | |
| 283 | CGCGAAAGGCCUUGUGGUACUGC | 1435 | 34047 | HCVa:301121 antisense siNA | AGcAccucAAGAccuuuGGTsT | 1887 |
| | | | | (283C) inact3 stab08 | | |
| 304 | GCCUGAUAGGGUGCUUGCGAGUG | 1444 | 34048 | HCVa:322121 antisense siNA | cucAcAAGcAGccuAuccGTsT | 1888 |
| | | | | (304C) inact1 stab08 | | |
| 304 | GCCUGAUAGGGUGCUUGCGAGUG | 1444 | 34049 | HCVa:322121 antisense siNA | cucccAAGuAcccuAGcAGTsT | 1889 |
| | | | | (304C) inact2 stab08 | | |
| 304 | GCCUGAUAGGGUGCUUGCGAGUG | 1444 | 34050 | HCVa:322121 antisense siNA | cccGcAAucAccAuAucGGTsT | 1890 |
| | | | | (304C) inact3 stab08 | | |
| 307 | UGAUAGGGUGCUUGCGAGUGCCC | 1446 | 34051 | HCVa:325121 antisense siNA | GuAcucGccAGcAcccAAuTsT | 1891 |
| | | | | (307C) inact1 stab08 | | |
| 307 | UGAUAGGGUGCUUGCGAGUGCCC | 1446 | 34052 | HCVa:325121 antisense siNA | ccAcucGcAGGcAccAuAuTsT | 1892 |
| | | | | (307C) inact2 stab08 | | |
| 307 | UGAUAGGGUGCUUGCGAGUGCCC | 1446 | 34053 | HCVa:325121 antisense siNA | AcAcGcGcAAGuAcccucuTsT | 1893 |
| | | | | (307C) inact3 stab08 | | |
| 282 | UCGCGAAAGGCCUUGUGGUACUG | 1434 | 34054 | HCVa:282U21 sense siNA inv | B cAuGGuGuuccGGAAAGcGTT B | 1894 |
| | | | | stab07 | | |
| 283 | CGCGAAAGGCCUUGUGGUACUGC | 1435 | 34055 | HCVa:283U21 sense siNA inv | B ucAuGGuGuuccGGAAAGcTT B | 1895 |
| | | | | stab07 | | |
| 304 | GCCUGAUAGGGUGCUUGCGAGUG | 1444 | 34056 | HCVa:304U21 sense siNA inv | B GAGcGuucGuGGGAuAGucTT B | 1896 |
| | | | | stab07 | | |
| 307 | UGAUAGGGUGCUUGCGAGUGCCC | 1446 | 34057 | HCVa:307U21 sense siNA inv | B cGuGAGcGuucGuGGGAuATT B | 1897 |
| | | | | stab07 | | |
| 282 | UCGCGAAAGGCCUUGUGGUACUG | 1434 | 34058 | HCVa:300L21 antisense siNA | cGcuuuccGGAAcAccAuGTsT | 1898 |
| | | | | (282C) inv stab08 | | |
| 283 | CGCGAAAGGCCUUGUGGUACUGC | 1435 | 34059 | HCVa:301L21 antisense siNA | GcuuuccGGAAcAccAuGATsT | 1899 |
| | | | | (283C) inv stab08 | | |
| 304 | GCCUGAUAGGGUGCUUGCGAGUG | 1444 | 34060 | HCVa:322L21 antisense siNA | GAcuAucccAcGAAcGcucTsT | 1900 |
| | | | | (304C) inv stab08 | | |
| 307 | UGAUAGGGUGCUUGCGAGUGCCC | 1446 | 34061 | HCVa:325L21 antisense siNA | uAucccAcGAAcGcucAcGTsT | 1901 |
| | | | | (307C) inv stab08 | | |
| 82 | UAGCCAUGGCGUUAGUAUGAGUG | 1460 | 34128 | HCVb:100L18 (82C) 5′p | pUCAUACUAACGCCAUGGC GUUAGUAUGAB | 1902 |
| | | | | palindrome siNA | | |
| 82 | UAGCCAUGGCGUUAGUAUGAGUG | 1460 | 34129 | HCVb:100L17 (82C) 5′p | pCAUACUAACGCCAUGGC GUUAGUAUGB | 1903 |
| | | | | palindrome siNA | | |
| 82 | UAGCCAUGGCGUUAGUAUGAGUG | 1460 | 34130 | HCVb:100L16 (82C) 5′p | pAUACUAACGCCAUGGC GUUAGUAUB | 1904 |
| | | | | palindrome siNA | | |
| 82 | UAGCCAUGGCGUUAGUAUGAGUG | 1460 | 34131 | HCVb:100L15 (82C) 5′p | pUACUAACGCCAUGGC GUUAGUAB | 1905 |
| | | | | palindrome siNA | | |
| 126 | CCCUCCCGGGAGAGCCAUAGUGG | 1461 | 34132 | HCVb:144L19 (126C) 5′p | pACUAUGGCUCUCCCGGGAG AGCCAUAGUB | 1906 |
| | | | | palindrome siNA | | |
| 126 | CCCUCCCGGGAGAGCCAUAGUGG | 1461 | 34133 | HCVb:144L18 (126C) 5′p | pCUAUGGCUCUCCCGGGAG AGCCAUAGB | 1907 |
| | | | | palindrome siNA | | |
| 126 | CCCUCCCGGGAGAGCCAUAGUGG | 1461 | 34134 | HCVb:144L17 (126C) 5′p | pUAUGGCUCUCCCGGGAG AGCCAUAB | 1908 |
| | | | | palindrome siNA | | |
| 126 | CCCUCCCGGGAGAGCCAUAGUGG | 1461 | 34135 | HCVb:144L16 (126C) 5′p | pAUGGCUCUCCCGGGAG AGCCAUB | 1909 |
| | | | | palindrome siNA | | |
| 126 | CCCUCCCGGGAGAGCCAUAGUGG | 1461 | 34136 | HCVb:144L15 (126C) 5′p | pUGGCUCUCCCGGGAG AGCCAB | 1910 |
| | | | | palindrome siNA | | |
| 155 | GAACCGGUGAGUACACCGGAAUU | 1432 | 34137 | HCVb:171L17 (155C) 5′p | pCCGGUGUACUCACCGGU GAGUACACCGGB | 1911 |
| | | | | palindrome siNA | | |
| 155 | GAACCGGUGAGUACACCGGAAUU | 1432 | 34138 | HCVb:170L16 (155C) 5′p | pCGGUGUACUCACCGGU GAGUACACCGB | 1912 |
| | | | | palindrome siNA | | |
| 155 | GAACCGGUGAGUACACCGGAAUU | 1432 | 34139 | HCVb:169L15 (155C) 5′p | pGGUGUACUCACCGGU GAGUACACCB | 1913 |
| | | | | palindrome siNA | | |
| 315 | GCCCCGGGAGGUCUCGUAGACCG | 1416 | 34140 | HCVb:331L17 (315C) 5′p | pCUACGAGACCUCCCGGG AGGUCUCGUAGB | 1914 |
| | | | | palindrome siNA | | |
| 315 | GCCCCGGGAGGUCUCGUAGACCG | 1416 | 34141 | HCVb:330L16 (315C) 5′p | pUACGAGACCUCCCGGG AGGUCUCGUAB | 1915 |
| | | | | palindrome siNA | | |
| 315 | GCCCCGGGAGGUCUCGUAGACCG | 1416 | 34142 | HCVb:329L15 (315C) 5′p | pACGAGACCUCCCGGG AGGUCUCGUB | 1916 |
| | | | | palindrome siNA | | |
| 327 | CCCCGGGAGGUCUCGUAGACCGU | 1417 | 34494 | HCVa:345L21 antisense siNA | GGucuAcGAGAccucccGGTT B | 1917 |
| | | | | (327C) stab19 | | |
| 327 | CCCCGGGAGGUCUCGUAGACCGU | 1417 | 34495 | HCVa:345L21 antisense siNA | GGcccuccAGAGcAucuGGTT B | 1918 |
| | | | | (327C) inv stab19 | | |
| 304 | GCCUGAUAGGGUGCUUGCGAGUG | 1444 | 34496 | HCVa:322L21 antisense siNA | cucGcAAGcAcccuAucAGTT B | 1919 |
| | | | | (304C) stab19 | | |
| 304 | GCCUGAUAGGGUGCUUGCGAGUG | 1444 | 34499 | HCVa:322L21 antisense siNA | GAcuAucccAcGAAcGcucTT B | 1920 |
| | | | | (304C) inv stab19 | | |
| 282 | UCGCGAAAGGCCUUGUGGUACUG | 1434 | 34581 | HCVa:282U21 sense siNA | GCGAAAGGCCUUGUGGUACTT | 1921 |
| | | | | stab00 | | |
| 283 | CGCGAAAGGCCUUGUGGUACUGC | 1435 | 34582 | HCVa:283U21 sense siNA | CGAAAGGCCUUGUGGUACUTT | 1922 |
| | | | | stab00 | | |
| 304 | GCCUGAUAGGGUGCUUGCGAGUG | 1444 | 34583 | HCVa:304U21 sense siNA | CUGAUAGGGUGCUUGCGAGTT | 1923 |
| | | | | stab00 | | |
| 307 | UGAUAGGGUGCUUGCGAGUGCCC | 1446 | 34584 | HCVa:307U21 sense siNA | AUAGGGUGCUUGCGAGUGCTT | 1924 |
| | | | | stab00 | | |
| 327 | CCCCGGGAGGUCUCGUAGACCGU | 1417 | 34585 | HCVa:327U21 sense siNA | CCGGGAGGUCUCGUAGACCTT | 1925 |
| | | | | stab00 | | |
| 282 | UCGCGAAAGGCCUUGUGGUACUG | 1434 | 34586 | HCVa:300L21 antisense siNA | GUACCACAAGGCCUUUCGCTT | 1926 |
| | | | | (282C) stab00 | | |
| 283 | CGCGAAAGGCCUUGUGGUACUGC | 1435 | 34587 | HCVa:301L21 antisense siNA | AGUACCACAAGGCCUUUCGTT | 1927 |
| | | | | (283C) stab00 | | |
| 304 | GCCUGAUAGGGUGCUUGCGAGUG | 1444 | 34588 | HCVa:322L21 antisense siNA | CUCGCAAGCACCCUAUCAGTT | 1928 |
| | | | | (304C) stab00 | | |
| 307 | UGAUAGGGUGCUUGCGAGUGCCC | 1446 | 34589 | HCVa:325L21 antisense siNA | GCACUCGCAAGCACCCUAUTT | 1929 |
| | | | | (307C) stab00 | | |
| 282 | UCGCGAAAGGCCUUGUGGUACUG | 1434 | 34590 | HCVa:282U21 sense siNA inv | CAUGGUGUUCCGGAAAGCGTT | 1930 |
| | | | | stab00 | | |
| 283 | CGCGAAAGGCCUUGUGGUACUGC | 1435 | 34591 | HCVa:283U21 sense siNA inv | UCAUGGUGUUCCGGAAAGCTT | 1931 |
| | | | | stab00 | | |
| 304 | GCCUGAUAGGGUGCUUGCGAGUG | 1444 | 34592 | HCVa:304U21 sense siNA inv | GAGCGUUCGUGGGAUAGUCTT | 1932 |
| | | | | stab00 | | |
| 307 | UGAUAGGGUGCUUGCGAGUGCCC | 1446 | 34593 | HCVa:307U21 sense siNA inv | CGUGAGCGUUCGUGGGAUATT | 1933 |
| | | | | stab00 | | |
| 327 | CCCCGGGAGGUCUCGUAGACCGU | 1417 | 34594 | HCVa:327U21 sense siNA inv | CCAGAUGCUCUGGAGGGCCTT | 1934 |
| | | | | stab00 | | |
| 282 | UCGCGAAAGGCCUUGUGGUACUG | 1434 | 34595 | HCVa:300L21 antisense siNA | CGCUUUCCGGAACACCAUGTT | 1935 |
| | | | | (282C) inv stab00 | | |
| 283 | CGCGAAAGGCCUUGUGGUACUGC | 1435 | 34596 | HCVa:301L21 antisense siNA | GCUUUCCGGAACACCAUGATT | 1936 |
| | | | | (283C) inv stab00 | | |
| 304 | GCCUGAUAGGGUGCUUGCGAGUG | 1444 | 34597 | HCVa:322L21 antisense siNA | GACUAUCCCACGAACGCUCTT | 1937 |
| | | | | (304C) inv stab00 | | |
| 307 | UGAUAGGGUGCUUGCGAGUGCCC | 1446 | 34598 | HCVa:325L21 antisense siNA | UAUCCCACGAACGCUCACGTT | 1938 |
| | | | | (307C) inv stab00 | | |
| 327 | CCCCGGGAGGUCUCGUAGACCGU | 1417 | 34599 | HCVa:345L21 antisense siNA | GGCCCUCCAGAGCAUCUGGTT | 1939 |
| | | | | (327C) inv stab00 | | |
| 327 | CCCCGGGAGGUCUCGUAGACCGU | 1417 | 35173 | HCVa:327U21 sense siNA | B ccGGGAGGucucGUAGACCTT B | 1940 |
| | | | | stab07 N1 | | |
| 327 | CCCCGGGAGGUCUCGUAGACCGU | 1417 | 35174 | HCVa:345L21 antisense siNA | GGUCUAcGAGAccucccGGTsT | 1941 |
| | | | | (327C) stab08 N1 | | |
| 327 | CCCCGGGAGGUCUCGUAGACCGU | 1417 | 35175 | HCVa:345L21 antisense siNA | GGUcuAcGAGAccucccGGTsT | 1942 |
| | | | | (327C) stab25 | | |
| 327 | CCCCGGGAGGUCUCGUAGACCGU | 1417 | 35176 | HCVa:345L21 antisense siNA | GGucuAcGAGAccucccGGTsT | 1943 |
| | | | | (327C) stab08 N3 | | |
| 327 | CCCCGGGAGGUCUCGUAGACCGU | 1417 | 35177 | HCVa:345L21 antisense siNA | GGucuAcGAGAccucccGGTsT | 1944 |
| | | | | (327C) stab24 | | |
| 304 | GCCUGAUAGGGUGCUUGCGAGUG | 1444 | 35178 | HCVa:304U21 sense siNA | B cuGAuAGGGuGcuUGCGAGTT B | 1945 |
| | | | | stab07 N1 | | |
| 304 | GCCUGAUAGGGUGCUUGCGAGUG | 1444 | 35179 | HCVa:322L21 antisense siNA | CUCGCAAGcAcccuAucAGTsT | 1946 |
| | | | | (304C) stab08 N1 | | |
| 304 | GCCUGAUAGGGUGCUUGCGAGUG | 1444 | 35180 | HCVa:322L21 antisense siNA | CUCGcAAGcAcccuAucAGTsT | 1947 |
| | | | | (304C) stab25 | | |
| 304 | GCCUGAUAGGGUGCUUGCGAGUG | 1444 | 35181 | HCVa:322L21 antisense siNA | CUcGcAAGcAcccuAucAGTsT | 1948 |
| | | | | (304C) stab08 N3 | | |
| 304 | GCCUGAUAGGGUGCUUGCGAGUG | 1444 | 35182 | HCVa:322L21 antisense siNA | CucGcAAGcAcccuAucAGTsT | 1949 |
| | | | | (304C) stab24 | | |
| 327 | CCCCGGGAGGUCUCGUAGACCGU | 1417 | 35225 | HCVa:327 siNA stab0/0 | GGUCUACGAGACCUCCCGG | 1950 |
| | | | | Pal01 | CCGGGAGGUCUCGUAGACC | |
| 327 | CCCCGGGAGGUCUCGUAGACCGU | 1417 | 35226 | HCVa:327 siNA stab0/0 PaI02 | GGUCUACGAGACCUCCCGG | 1951 |
| | | | | | CCGGGAGGUCUCGUAGACCTT | |
| 327 | CCCCGGGAGGUCUCGUAGACCGU | 1417 | 35227 | HCVa:327 siNA stab0/0 PaI03 | GGUCUACGAGACCUCCCG | 1952 |
| | | | | | CGGGAGGUCUCGUAGACC | |
| 327 | CCCCGGGAGGUCUCGUAGACCGU | 1417 | 35228 | HCVa:327 siNA stab0/0 PaI04 | GGUCUACGAGACCUCCCG | 1953 |
| | | | | | CGGGAGGUCUCGUAGACCTT | |
| 327 | CCCCGGGAGGUCUCGUAGACCGU | 1417 | 35229 | HCVa:327 siNA stab0/0 PaI05 | GGUCUACGAGACCUCCC | 1954 |
| | | | | | GGGAGGUCUCGUAGACC | |
| 327 | CCCCGGGAGGUCUCGUAGACCGU | 1417 | 35230 | HCVa:327 siNA stab0/0 PaI06 | GGUCUACGAGACCUCCC | 1955 |
| | | | | | GGGAGGUCUCGUAGACCTT | |
| 327 | CCCCGGGAGGUCUCGUAGACCGU | 1417 | 35231 | HCVa:327 siNA stab0/0 PaI07 | GGUCUACGAGACCUCC | 1956 |
| | | | | | GGAGGUCUCGUAGACC | |
| 327 | CCCCGGGAGGUCUCGUAGACCGU | 1417 | 35232 | HCVa:327 siNA stab0/0 PaI08 | GGUCUACGAGACCUCC | 1957 |
| | | | | | GGAGGUCUCGUAGACCTT | |
| 327 | CCCCGGGAGGUCUCGUAGACCGU | 1417 | 35235 | HCVa:327 siNA stab0/0 PaI11 | GUCUACGAGACCUCCCGG | 1958 |
| | | | | | GAGGUCUCGUAGAC | |
| 327 | CCCCGGGAGGUCUCGUAGACCGU | 1417 | 35236 | HCVa:327 siNA stab0/0 PaI12 | GUCUACGAGACCUCCCGG | 1959 |
| | | | | | GAGGUCUCGUAGACTT | |
| 327 | CCCCGGGAGGUCUCGUAGACCGU | 1417 | 35237 | HCVa:327 siNA stab0/0 PaI13 | UCUACGAGACCUCCCGG | 1960 |
| | | | | | GAGGUCUCGUAGA | |
| 327 | CCCCGGGAGGUCUCGUAGACCGU | 1417 | 35238 | HCVa:327 siNA stab0/0 PaI14 | UCUACGAGACCUCCCGG | 1961 |
| | | | | | GAGGUCUCGUAGATT | |
| 327 | CCCCGGGAGGUCUCGUAGACCGU | 1417 | 35239 | HCVa:327 siNA stab0/0 PaI15 | CUACGAGACCUCCCGG | 1962 |
| | | | | | GAGGUCUCGUAG | |
| 327 | CCCCGGGAGGUCUCGUAGACCGU | 1417 | 35240 | HCVa:327 siNA stab0/0 PaI16 | CUACGAGACCUCCCGG | 1963 |
| | | | | | GAGGUCUCGUAGTT | |
| 327 | CCCCGGGAGGUCUCGUAGACCGU | 1417 | 35241 | HCVa:327 siNA stab0/0 PaI17 | GGUCUACGAGACCUCCAGG | 1964 |
| | | | | | UCUCGUAGACC | |
| 327 | CCCCGGGAGGUCUCGUAGACCGU | 1417 | 35242 | HCVa:327 siNA stab0/0 PaI18 | GGUCUACGAGACCUCCAGG | 1965 |
| | | | | | UCUCGUAGACCTT | |
| 327 | CCCCGGGAGGUCUCGUAGACCGU | 1417 | 35243 | HCVa:327 siNA stab0/0 PaI19 | GGUCUACGAGACCUCGAGG | 1966 |
| | | | | | UCUCGUAGACC | |
| 327 | CCCCGGGAGGUCUCGUAGACCGU | 1417 | 35244 | HCVa:327 siNA stab0/0 PaI20 | GGUCUACGAGACCUCGAGG | 1967 |
| | | | | | UCUCGUAGACCTT | |
| 327 | CCCCGGGAGGUCUCGUAGACCGU | 1417 | 35245 | HCVa:327 siNA stab0/0 PaI21 | GGUCUACGAGACCUGCAGG | 1968 |
| | | | | | UCUCGUAGACC | |
| 327 | CCCCGGGAGGUCUCGUAGACCGU | 1417 | 35246 | HCVa:327 siNA stab0/0 PaI22 | GGUCUACGAGACCUGCAGG | 1969 |
| | | | | | UCUCGUAGACCTT | |
| 304 | GCCUGAUAGGGUGCUUGCGAGUG | 1444 | 35247 | HCVa:304 siNA stab0/0 PaI01 | GACUAUCCCACGAACGCUC | 1970 |
| | | | | | GAGCGUUCGUGGGAUAGUCTT | |
| 304 | GCCUGAUAGGGUGCUUGCGAGUG | 1444 | 35248 | HCVa:304 siNA stab0/0 PaI02 | GACUAUCCCACGAACGCUC | 1971 |
| | | | | | GAGCGUUCGUGGGAUAGUC | |
| 304 | GCCUGAUAGGGUGCUUGCGAGUG | 1444 | 35249 | HCVa:304 siNA stab0/0 PaI03 | GACUAUCCCACGAACGCGU | 1972 |
| | | | | | UCGUGGGAUAGUCTT | |
| 304 | GCCUGAUAGGGUGCUUGCGAGUG | 1444 | 35250 | HCVa:304 siNA stab0/0 PaI04 | GACUAUCCCACGAACGCGU | 1973 |
| | | | | | UCGUGGGAUAGUC | |
| 304 | GCCUGAUAGGGUGCUUGCGAGUG | 1444 | 35251 | HCVa:304 siNA stab0/0 PaI05 | GACUAUCCCACGAACGUUC | 1974 |
| | | | | | GUGGGAUAGUCTT | |
| 304 | GCCUGAUAGGGUGCUUGCGAGUG | 1444 | 35252 | HCVa:304 siNA stab0/0 PaI06 | GACUAUCCCACGAACGUUC | 1975 |
| | | | | | GUGGGAUAGUC | |
| 304 | GCCUGAUAGGGUGCUUGCGAGUG | 1444 | 35253 | HCVa:304 siNA stab0/0 PaI07 | ACUAUCCCACGAACGUUC | 1976 |
| | | | | | GUGGGAUAGUTT | |
| 304 | GCCUGAUAGGGUGCUUGCGAGUG | 1444 | 35254 | HCVa:304 siNA stab0/0 PaI08 | ACUAUCCCACGAACGUUC | 1977 |
| | | | | | GUGGGA | |
| 327 | CCCCGGGAGGUCUCGUAGACCGU | 1462 | 36414 | HCVa bf-L-21 siNA stab00 | CCGGGAGGUCUCGUAGACCTT L | 1978 |
| | UCGCGAAAGGCCUUGUGGUACUG | | | [HCVa:327U21 sense o18S | GCGAAAGGCCUUGUGGUACTT | |
| | | | | HCVa:282U21 sense] | | |
| 327 | CCCCGGGAGGUCUCGUAGACCGU | 1463 | 36415 | HCVa bf-L-22 siNA stab00 | CCGGGAGGUCUCGUAGACCTT L | 1979 |
| | UGAUAGGGUGCUUGCGAGUGCCC | | | [HCVa:327U21 sense o18S | AUAGGGUGCUUGCGAGUGCTT | |
| | | | | HCVa:307U21 sense] | | |
| 307 | UGAUAGGGUGCUUGCGAGUGCCC | 1464 | 36430 | HCVa bf-L-20 siNA stab00 | AUAGGGUGCUUGCGAGUGCTT L | 1980 |
| | UCGCGAAAGGCCUUGUGGUACUG | | | [HCVa:307U21 sense o18S | GCGAAAGGCCUUGUGGUACTT | |
| | | | | HCVa:282U21 sense] | | |
| 307 | UGAUAGGGUGCUUGCGAGUGCCC | 1446 | 36438 | HCVa:307U21 sense siNA stab00 | AUAGGGUGCUUGCGAGUGCTT | 1924 |
| 307 | UGAUAGGGUGCUUGCGAGUGCCC | 1446 | 36446 | HCVa:325L21 antisense siNA | GCACUCGCAAGCACCCUAUTT | 1929 |
| | | | | (307C) stab00 | | |
| 327 | CCCCGGGAGGUCUCGUAGACCGU | 1417 | 36447 | HCVa:345L21 antisense siNA | GGUCUACGAGACCUCCCGGTT | 1732 |
| | | | | (327C) stab00 | | |
| 304 | GCCUGAUAGGGUGCUUGCGAGUG | 1444 | 36727 | HCVa:304U21 sense siNA stab09 | B CUGAUAGGGUGCUUGCGAGTT B | 1981 |
| 304 | GCCUGAUAGGGUGCUUGCGAGUG | 1444 | 36728 | HCVa:322L21 antisense siNA | CUCGCAAGCACCCUAUCAGTsT | 1982 |
| | | | | (304C) stab10 | | |
| 304 | GCCUGAUAGGGUGCUUGCGAGUG | 1444 | 37010 | HCVa:304U21 sense siNA stab04 | B cuGAuAGGGuGcuuGcGAGTT B | 1983 |
| 304 | GCCUGAUAGGGUGCUUGCGAGUG | 1444 | 37011 | HCVa:322L21 antisense siNA | cucGcAAGcAcccuAucAGTsT | 1984 |
| | | | | (304C) stab05 | | |
| 307 | CCCCGGGAGGUCUCGUAGACCGU | 1463 | 37781 | HCVa bf-L-22 siNA stab07 | B ccGGGAGGucucGuAGAccTT L | 1985 |
| | UGAUAGGGUGCUUGCGAGUGCCC | | | [HCVa:327U21 sense o18S | AuAGGGuGcuuGcGAGuGcTT B | |
| | | | | HCVa:307U21 sense] | | |
| 307 | UGAUAGGGUGCUUGCGAGUGCCC | 1446 | 37790 | HCVa:325L21 antisense siNA | GCAcucGcAAGcAcccuAuTT | 1986 |
| | | | | (307C) stab26 | | |
| 327 | CCCCGGGAGGUCUCGUAGACCGU | 1417 | 37791 | HCVa:345L21 antisense siNA | GGUcuAcGAGAccucccGGTT | 1987 |
| | | | | (327C) stab26 | | |
| 282 | UCGCGAAAGGCCUUGUGGUACUG | 1434 | 38279 | HCVa:300L21 antisense siNA | GUAccAcAAGGccuuucGcTsT | 1988 |
| | | | | (282C) stab25 | | |
| 283 | CGCGAAAGGCCUUGUGGUACUGC | 1435 | 38280 | HCVa:301L21 antisense siNA | AGUAccAcAAGGccuuucGTsT | 1989 |
| | | | | (283C) stab25 | | |
| 307 | UGAUAGGGUGCUUGCGAGUGCCC | 1446 | 38281 | HCVa:325L21 antisense siNA | GCAcucGcAAGcAcccuAuTsT | 1990 |
| | | | | (307C) stab25 | | |
| 304 | GCCUGAUAGGGUGCUUGCGAGUG | 1444 | 38283 | HCVa:322L21 antisense siNA | CUCGcAAGcAcccuAucAGTT | 1991 |
| | | | | (304C) stab26 | | |
| 304 | GCCUGAUAGGGUGCUUGCGAGUG | 1444 | 38284 | HCVa:322L21 antisense siNA | CUCGcAAGcAcccuAucAGTTB | 1992 |
| | | | | (304C) stab27 | | |
| 282 | UCGCGAAAGGCCUUGUGGUACUG | 1434 | 38293 | HCVa:300L21 antisense siNA | GuAccAcAAGGccuuucGcTT B | 1993 |
| | | | | (282C) stab19 | | |
| 282 | UCGCGAAAGGCCUUGUGGUACUG | 1434 | 38294 | HCVa:300L21 antisense siNA | GUAccAcAAGGccuuucGcTT | 1994 |
| | | | | (282C) stab26 | | |
| 282 | UCGCGAAAGGCCUUGUGGUACUG | 1434 | 38295 | HCVa:300L21 antisense siNA | GUAccAcAAGGccuuucGcTT B | 1995 |
| | | | | (282C) stab27 | | |
| 282 | UCGCGAAAGGCCUUGUGGUACUG | 1434 | 38296 | HCVa:300L21 antisense siNA | GuAccAcAAGGccuuucGcTsT | 1998 |
| | | | | (282C) stab29 | | |
| 282 | UCGCGAAAGGCCUUGUGGUACUG | 1434 | 38297 | HCVa:300L21 antisense siNA | GuAccAcAAGGccuuucGcTT | 1997 |
| | | | | (282C) stab30 | | |
| 282 | UCGCGAAAGGCCUUGUGGUACUG | 1434 | 38298 | HCVa:300L21 antisense siNA | GuAccAcAAGGccuuucGcTT B | 1998 |
| | | | | (282C) stab31 | | |
| 282 | UCGCGAAAGGCCUUGUGGUACUG | 1434 | 38299 | HCVa:300L21 antisense siNA | GuAccAcAAGGccuuucGcTT | 1999 |
| | | | | (282C) stab32 | | |
| 304 | GCCUGAUAGGGUGCUUGCGAGUG | 1444 | 38300 | HCVa:322L21 antisense siNA | cucGcAAGcAcccuAucAGTT | 2000 |
| | | | | (304C) stab32 | | |
| 327 | CCCCGGGAGGUCUCGUAGACCGU | 1417 | 38301 | HCVa:345L21 antisense siNA | GGUcuAcGAGAccucccGGTT B | 2001 |
| | | | | (327C) stab27 | | |
| 327 | CCCCGGGAGGUCUCGUAGACCGU | 1417 | 38302 | HCVa:345L21 antisense siNA | GGucuAcGAGAccucccGGTT | 2002 |
| | | | | (327C) stab30 | | |
| 327 | CCCCGGGAGGUCUCGUAGACCGU | 1417 | 38303 | HCVa:345L21 antisense siNA | GGucuAcGAGAccucccGGTT B | 2003 |
| | | | | (327C) stab31 | | |
| 327 | CCCCGGGAGGUCUCGUAGACCGU | 1417 | 38304 | HCVa:345L21 antisense siNA | GGucuAcGAGAccucccGGTT | 2004 |
| | | | | (327C) stab32 | | |
| 304 | CCCCGGGAGGUCUCGUAGACCGU | 1465 | 38310 | HCV bf-L-23 siNA stab00 | CCGGGAGGUCUCGUAGACCU L | 2005 |
| | GCCUGAUAGGGUGCUUGCGAGUG | | | [HCV:327U21 sense o18S | CUGAUAGGGUGCUUGCGAGTT | |
| | | | | HCV:304U21 sense] | | |
| 282 | GCCUGAUAGGGUGCUUGCGAGUG | 1466 | 38311 | HCV bf-L-24 siNA stab00 | CUGAUAGGGUGCUUGCGAGTT L | 2006 |
| | UCGCGAAAGGCCUUGUGGUACUG | | | [HCV:304U21 sense o18S | GCGAAAGGCCUUGUGGUACTT | |
| | | | | HCV:282U21 sense] | | |
| 304 | CCCCGGGAGGUCUCGUAGACCGU | 1465 | 38312 | HCV bf-L-23 siNA stab07 | B ccGGGAGGucucGuAGAccTT L | 2007 |
| | GCCUGAUAGGGUGCUUGCGAGUG | | | [HCV:327U21 sense o18S | cuGAuAGGGuGcuuGcGAGTT B | |
| | | | | HCV:304U21 sense] | | |
| 282 | CCCCGGGAGGUCUCGUAGACCGU | 1462 | 38313 | HCV bf-L-21 siNA stab07 | B ccGGGAGGucucGuAGAccTT L | 2008 |
| | UCGCGAAAGGCCUUGUGGUACUG | | | [HCVa:327U21 sense o18S | GcGAAAGGccuuGuGGuAcTT B | |
| | | | | HCVa:282U21 sense] | | |
| 282 | GCCUGAUAGGGUGCUUGCGAGUG | 1466 | 38314 | HCV bf-L-24 siNA stab07 | B cuGAuAGGGuGcuuGcGAGTT L | 2009 |
| | UCGCGAAAGGCCUUGUGGUACUG | | | [HCV:304U21 sense o18S | GcGAAAGGccuuGuGGuAcTT B | |
| | | | | HCV:282U21 sense] | | |
| 304 | GCCUGAUAGGGUGCUUGCGAGUG | 1444 | 38758 | HCVa:322L21 siRNA (304C) | CUCGcAAGcAcccuAucAGUU | 2010 |
| | | | | stab26 | | |
| 327 | CCCCGGGAGGUCUCGUAGACCGU | 1417 | 38759 | HCVa:345L21 siRNA (327C) | GGUcuAcGAGAccucccGGUU | 2011 |
| | | | | stab26 | | |
| 304 | GCCUGAUAGGGUGCUUGCGAGUG | 1444 | 46211 | HCVa:322L21 siRNA (304C) | CUCGcAAGcAcccuAucAGGC | 2012 |
| | | | | stab26 | | |
| 327 | CCCCGGGAGGUCUCGUAGACCGU | 1417 | 46214 | HCVa:345L21 siRNA (327C) | GGUcuAcGAGAccucccGGGC | 2013 |
| | | | | stab26 | | |
| 292 | CUGAUAGGGCGCUUGCGAG | 2014 | 46672 | HCV-JFH-1::(292)U23 siRNA | B cuGAuAGGGcGcuuGcGAGTT B | 2034 |
| | | | | stab07 active | | |
| 292 | CUGAUAGGGCGCUUGCGAG | 2014 | 46673 | HCV-JFH-1::(292)L21 siRNA | CUCGcAAGcGcccuAucAGTsT | 2035 |
| | | | | stab25 active | | |
| | | | 46746 | HCVa:(293)U23 siRNA | B cuGAuAcccAcGAuGcGAGTT B 2036 | |
| | | | | stab07 control01 | | |
| | | | 46747 | HCVa:(316)U23 siRNA | B ccGGGAccAGAGcuAGAccTT B | 2037 |
| | | | | stab07 control01 | | |
| | | | 46748 | HCVa:(271)U23 siRNA | B GcGAAAccGGAAcuGGuAcTT B | 2038 |
| | | | | stab07 control01 | | |
| | | | 46751 | HCVa:(293)L21 siRNA | CUCGcAucGuGGGuAucAGTsT | 2039 |
| | | | | stab25 control01 | | |
| | | | 46752 | HCVa:(316)L21 siRNA | GGUcuAGcucuGGucccGGTsT | 2040 |
| | | | | stab25 control01 | | |
| | | | 46753 | HCVa:(271)L21 siRNA | GUAccAGuuccGGuuucGcTsT | 2041 |
| | | | | stab25 control01 | | |
| | | | 46755 | HCVa:(316)L21 siRNA | GGucuAGcucuGGucccGGTsT | 2042 |
| | | | | stab29 control01 | | |
| | | | 46756 | HCVa:(271)U21 siRNA | GuAccAGuuccGGuuucGcTsT | 2043 |
| | | | | stab29 control01 | | |
| | | | 46757 | HCVa:(293)L21 siRNA | cucGcAucGuGGGuAucAGTsT | 2044 |
| | | | | stab08 control01 | | |
| 293 | GCCUGAUAGGGUGCUUGCGAGUG | 1444 | 47023 | HCVa:(293)L21 siRNA | GACuAucccAcGAAcGcucTsT | 2045 |
| | | | | stab25 invert | | |
| 293 | GCCUGAUAGGGUGCUUGCGAGUG | 1444 | 47024 | HCVa:(293)L21 siRNA | GAcuAucccAcGAAcGCUCTsT | 2046 |
| | | | | stab25 invert | | |
| 293 | GCCUGAUAGGGUGCUUGCGAGUG | 1444 | 47025 | HCVa:(293)U22 siRNA | B cuGAuAGGGuGcuuGcGAGTT | 2047 |
| | | | | stab07 3′ n-1 | | |
| 293 | GCCUGAUAGGGUGCUUGCGAGUG | 1444 | 47026 | HCVa:(293)U21 siRNA | B cuGAuAGGGuGcuuGcGAGT | 2048 |
| | | | | stab07 3′ n-2 | | |
| 293 | GCCUGAUAGGGUGCUUGCGAGUG | 1444 | 47027 | HCVa:(293)U22 siRNA | cuGAuAGGGuGcuuGcGAGTT B | 2049 |
| | | | | stab07 5′ n-1 | | |
| 293 | GCCUGAUAGGGUGCUUGCGAGUG | 1444 | 47028 | HCVa:(293)U21 siRNA | uGAuAGGGuGcuuGcGAGTT B | 2050 |
| | | | | stab07 5′-2 | | |
| 293 | GCCUGAUAGGGUGCUUGCGAGUG | 1444 | 47029 | HCVa:(293)U20 siRNA | GAuAGGGuGcuuGcGAGTT B | 2051 |
| | | | | stab07 5′-3 | | |
| 293 | GCCUGAUAGGGUGCUUGCGAGUG | 1444 | 47030 | HCVa:(293)L20 siRNA | cucGcAAGcAcccuAucAGT | 2052 |
| | | | | stab08 3′-1 | | |
| 293 | GCCUGAUAGGGUGCUUGCGAGUG | 1444 | 47031 | HCVa:(293)L19 siRNA | cucGcAAGcAcccuAucAG | 2053 |
| | | | | stab08 3′-2 | | |
| 293 | GCCUGAUAGGGUGCUUGCGAGUG | 1444 | 47032 | HCVa:(293)L18 siRNA | cucGcAAGcAcccuAucA | 2054 |
| | | | | 3′-3 stab08 | | |
| 293 | GCCUGAUAGGGUGCUUGCGAGUG | 1444 | 47033 | HCVa:(293)L20 siRNA | ucGcAAGcAcccuAucAGTsT | 2055 |
| | | | | 5′-1 stab08 | | |
| 293 | GCCUGAUAGGGUGCUUGCGAGUG | 1444 | 47034 | HCVa:(293)L19 siRNA | cGcAAGcAcccuAucAGTsT | 2056 |
| | | | | 5′-2 stab08 | | |
| 293 | GCCUGAUAGGGUGCUUGCGAGUG | 1444 | 47035 | HCVa:(293)L18 siRNA | GcAAGcAcccuAucAGTsT | 2057 |
| | | | | 5′-3 stab08 | | |
| 293 | GCCUGAUAGGGUGCUUGCGAGUG | 1444 | 47036 | HCVa:(293)L20 siRNA | CUCGcAAGcAcccuAucAGT | 2058 |
| | | | | 3′-1 stab25 | | |
| 293 | UGAUAGGGUGCUUGCGAG | 2015 | 47038 | HCVa:(293)L18 siRNA | CUCGcAAGcAcccuAucA | 2059 |
| | | | | 3′ n-3 stab25 | | |
| 293 | GCCUGAUAGGGUGCUUGCGAGUG | 1444 | 47039 | HCVa:(293)L20 siRNA | UCGcAAGcAcccuAucAGTsT | 2060 |
| | | | | 5′-1 stab25 | | |
| 293 | AACUGAUAGGGUGCUUGCG | 2016 | 47040 | HCVa:(293)L19 siRNA | CGcAAGcAcccuAucAGTsT | 2061 |
| | | | | 5′-2 stab25 | | |
| 73 | GUCUUCACGCAGAAAGCGUCUAG | 2017 | 47208 | HCVa:(73)U23 siRNA | B cuucAcGcAGAAAGcGucuTT B | 2062 |
| | | | | stab07 | | |
| 86 | AAGCGUCUAGCCAUGGCGUUAGU | 2018 | 47209 | HCVa:(86)U23 siRNA | B GcGucuAGccAuGGcGuuATT B | 2063 |
| | | | | stab07 | | |
| 172 | GUGAGUACACCGGAAUUGCCAGG | 2019 | 47212 | HCVa:(172)U23 siRNA | B GAGuAcAccGGAAuuGccATT B | 2064 |
| | | | | stab07 | | |
| 195 | ACGACCGGGUCCUUUCUUGGAUC | 2020 | 47213 | HCVa:(195)U23 siRNA | B GAccGGGuccuuucuuGGATT B | 2065 |
| | | | | stab07 | | |
| 220 | CCCGCUCAAUGCCUGGAGAUUUG | 2021 | 47214 | HCVa:(220)U23 siRNA | B cGcucAAuGccuGGAGAuuTT B | 2066 |
| | | | | stab07 | | |
| 250 | CCCCGCGAGACUGCUAGCCGAGU | 2022 | 47215 | HCVa:(250)U23 siRNA | B ccGcGAGAcuGcuAGccGATT B | 2067 |
| | | | | stab07 | | |
| 252 | CCGCGAGACUGCUAGCCGAGUAG | 2023 | 47216 | HCVa:(252)U23 siRNA | B GcGAGAcuGcuAGccGAGuTT B | 2068 |
| | | | | stab07 | | |
| 267 | CCGAGUAGUGUUGGGUCGCGAAA | 2024 | 47217 | HCVa:(267)U23 siRNA | B GAGuAGuGuuGGGucGcGATT B | 2069 |
| | | | | stab07 | | |
| 274 | GUGUUGGGUCGCGAAAGGCCUUG | 2025 | 47218 | HCVa:(274)U23 siRNA | B GuuGGGucGcGAAAGGccuTT B | 2070 |
| | | | | stab07 | | |
| 277 | UUGGGUCGCGAAAGGCCUUGUGG | 2026 | 47219 | HCVa:(277)U23 siRNA | B GGGucGcGAAAGGccuuGuTT B | 2071 |
| | | | | stab07 | | |
| 73 | GUCUUCACGCAGAAAGCGUCUAG | 2017 | 47222 | HCVa:(73)L21 siRNA | AGAcGcuuucuGcGuGAAGTsT | 2072 |
| | | | | stab25 | | |
| 86 | AAGCGUCUAGCCAUGGCGUUAGU | 2018 | 47223 | HCVa:(86)L21 siRNA | UAAcGccAuGGcuAGAcGcTsT | 2073 |
| | | | | stab25 | | |
| 140 | UCCCGGGAGAGCCAUAGUGGUCU | 1420 | 47224 | HCVa:(140)L21 siRNA | ACCAcuAuGGcucucccGGTsT | 2074 |
| | | | | stab25 | | |
| 157 | UGGUCUGCGGAACCGGUGAGUAC | 1426 | 47225 | HCVa:(157)L21 siRNA | ACUcAccGGuuccGcAGAcTsT | 2075 |
| | | | | stab25 | | |
| 172 | GUGAGUACACCGGAAUUGCCAGG | 2019 | 47226 | HCVa:(172)L21 siRNA | UGGcAAuuccGGuGuAcucTsT | 2076 |
| | | | | stab25 | | |
| 195 | ACGACCGGGUCCUUUCUUGGAUC | 2020 | 47227 | HCVa:(195)L21 siRNA | UCCAAGAAAGGAcccGGucTsT | 2077 |
| | | | | stab25 | | |
| 220 | CCCGCUCAAUGCCUGGAGAUUUG | 2021 | 47228 | HCVa:(220)L21 siRNA | AAUcuccAGGcAuuGAGcGTsT | 2078 |
| | | | | stab25 | | |
| 250 | CCCCGCGAGACUGCUAGCCGAGU | 2022 | 47229 | HCVa:(250)L21 siRNA | UCGGcuAGcAGucucGcGGTsT | 2079 |
| | | | | stab25 | | |
| 252 | CCGCGAGACUGCUAGCCGAGUAG | 2023 | 47230 | HCVa:(252)L21 siRNA | ACUcGGcuAGcAGucucGcTsT | 2080 |
| | | | | stab25 | | |
| 267 | CCGAGUAGUGUUGGGUCGCGAAA | 2024 | 47231 | HCVa:(267)L21 siRNA | UCGcGAcccAAcAcuAcucTsT | 2081 |
| | | | | stab25 | | |
| 274 | GUGUUGGGUCGCGAAAGGCCUUG | 2025 | 47232 | HCVa:(274)L21 siRNA | AGGccuuucGcGAcccAAcTsT | 2082 |
| | | | | stab25 | | |
| 277 | UUGGGUCGCGAAAGGCCUUGUGG | 2026 | 47233 | HCVa:(277)L21 siRNA | ACAAGGccuuucGcGAcccTsT | 2083 |
| | | | | stab25 | | |
| 303 | UGCCUGAUAGGGUGCUUGCGAGU | 1410 | 47234 | HCVa:(303)L21 siRNA | UCGcAAGcAcccuAucAGGTsT | 2084 |
| | | | | stab25 | | |
| 329 | CCGGGAGGUCUCGUAGACCGUGC | 1419 | 47235 | HCVa:(329)L21 siRNA | ACGGucuAcGAGAccucccTsT | 2085 |
| | | | | stab25 | | |
| | | | 47354 | HCVa:(293)U23 siRNA | B GAGcGuucGuGGGAuAGucTT B | 2086 |
| | | | | stab04 invert | | |
| | | | 47527 | HCVa:(316)L21 siRNA | GGcccuccAGAGcAucuGGTsT | 2087 |
| | | | | stab29A invert | | |
| | GAAAGGAUUUGGCUACAAA | 2027 | 47654 | HCVa/PPIB:(300)U25 | UUUGUAGCCAAAUCCUUUCUGGUAC | 2088 |
| | | | | bifunctional stab00 active | | |
| | AAGGAUUUGGCUACAAAAA | 2028 | 47655 | HCVa/PPIB:( )U27 bifunctional | UUUUUGUAGCCAAAUCCUUUGUGGUAC | 2089 |
| | | | | stab00 active | | |
| | AAGGACUUCAUGAUCCAGG | 2029 | 47663 | HCVa/PPIB:( )U27 bifunctional | CCUGGAUCAUGAAGUCCUUUGUGGUAC | 2090 |
| | | | | stab00 active | | |
| | GAGAGCACCAAGACAGACA | 2030 | 47664 | HCVa/PPIB:( )U27 bifunctional | UGUCUGUCUUGGUGCUCUCCUUGCGAG | 2091 |
| | | | | stab00 active | | |
| | AAAGACUGUUCCAAAAACA | 2031 | 47665 | HCVa/PPIB:( )U24 bifunctional | UGUUUUUGGAACAGUCUUUGCGAG | 2092 |
| | | | | stab00 active | | |
| | GAGAGCACCAAGACAGACA | 2030 | 47666 | HCVa/PPIB:( )U26 bifunctional | UGUCUGUCUUGGUGCUCUCGUAGACC | 2093 |
| | | | | stab00 active | | |
| | AGAUGGCACAGGAGGAAAG | 2032 | 47667 | HCVa/PPIB:( )U27 bifunctional | CUUUCCUCCUGUGCCAUCUCGUAGACC | 2094 |
| | | | | stab00 active | | |
| | GCGAAAGGCCUUGUGGUAC | 8 | 47668 | HCVa/PPIB:( )L25 bifunctional | GUACCACAAGGCCUUUCGCUACAAA | 2095 |
| | | | | stab00 active | | |
| | GCGAAAGGCCUUGUGGUAC | 8 | 47669 | HCVa/PPIB:( )L27 bifunctional | GUACCACAAGGCCUUUCGCUACAAAAA | 2096 |
| | | | | stab00 active | | |
| | GCGAAAGGCCUUGUGGUAC | 8 | 47670 | HCVa/PPIB:( )L27 bifunctional | GUACCACAAGGCCUUUCGCGAUCCAGG | 2097 |
| | | | | stab00 active | | |
| | CUGAUAGGGUGCUUGCGAG | 2033 | 47671 | HCVa/PPIB:( )L27 bifunctional | CUCGCAAGCACCCUAUCAGGACAGACA | 2098 |
| | | | | stab00 active | | |
| | CUGAUAGGGUGCUUGCGAG | 2033 | 47672 | HCVa/PPIB:( )L24 bifunctional | CUCGCAAGCACCCUAUCAGAAACA | 2099 |
| | | | | stab00 active | | |
| | CCGGGAGGUCUCGUAGACC | 38 | 47673 | HCVa/PPIB:( )L26 bifunctional | GGUCUACGAGACCUCCCGGACAGACA | 2100 |
| | | | | stab00 active | | |
| | CCGGGAGGUCUCGUAGACC | 38 | 47674 | HCVa/PPIB:( )L27 bifunctional | GGUCUACGAGACCUCCCGGGAGGAAAG | 2101 |
| | | | | stab00 active | | |
| 293 | GCCUGAUAGGGUGCUUGCGAGUG | 1444 | 47677 | HCVa:(293)L21 siRNA stab36 | CUCGcAAGcAcccuAucAGGC | 2102 |
| | | | | active | | |
| 316 | CCCCGGGAGGUCUCGUAGACCGU | 1417 | 38756 | HCVa:334L21 siRNA (316C) stab36 | GGUcuAcGAGAccucccGGGG | 2103 |
| 282 | UCGCGAAAGGCCUUGUGGUACUG | 1434 | 47786 | HCV:(282)U23 siRNA stab07B | B GcGAAAGGCCuuGuGGuAcTT B | 2104 |
| | | | | active | | |
| 304 | GCCUGAUAGGGUGCUUGCGAGUG | 1444 | 47787 | HCV:(304)U23 siRNA stab07B | B cuGAuAGGGUGcuuGcGAGTT B | 2105 |
| | | | | active | | |
| 327 | CCCCGGGAGGUCUCGUAGACCGU | 1417 | 47788 | HCV:(327)U23 siRNA stab07B | B ccGGGAGGUCucGuAGAccTT B | 2106 |
| | | | | active | | |
| 316 | CCCCGGGAGGUCUCGUAGACCGU | 1417 | 47791 | HCVa:(316)L21 siRNA stab35 | GGUcuAGcucuGGucccGGUU | 2107 |
| | | | | active | | |
| 282 | UCGCGAAAGGCCUUGUGGUACUG | 1434 | 47855 | HCVa:(282)U21 siRNA stab07C | B GcGAAAGGCCuuGuGGuAc B | 2108 |
| | | | | active | | |
| 293 | GCCUGAUAGGGUGCUUGCGAGUG | 1444 | 47856 | HCVa:(293)U21 siRNA stab07C | B cuGAuAGGGUGcuuGcGAG B | 2109 |
| | | | | active | | |
| 316 | CCCCGGGAGGUCUCGUAGACCGU | 1417 | 47857 | HCVa:(316)U21 siRNA stab07C | B ccGGGAGGUCucGuAGAcc B | 2110 |
| | | | | active | | |
| 282 | UCGCGAAAGGCCUUGUGGUACUG | 1434 | 47860 | HCVa:(282)U20 siRNA stab07D | B GcGAAAGGCCuuGuGGuAc | 2111 |
| | | | | active | | |
| 304 | GCCUGAUAGGGUGCUUGCGAGUG | 1444 | 47861 | HCV:(304)U20 siRNA stab07D | B cuGAuAGGGUGcuuGcGAG | 2112 |
| | | | | active | | |
| 316 | CCCCGGGAGGUCUCGUAGACCGU | 1417 | 47862 | HCVa:(316)U20 siRNA stab07 | B ccGGGAGGUCucGuAGAcc | 2113 |
| | | | | 3′-3 | | |
| 73 | GUCUUCACGCAGAAAGCGUCUAG | 2017 | 47878 | HCVa:(73)U23 siRNA stab07B | B cuucAcGcAGAAAGcGucuTT B | 2114 |
| | | | | active | | |
| 86 | AAGCGUCUAGCCAUGGCGUUAGU | 2018 | 47879 | HCVa:(86)U23 siRNA stab07B | B GcGucuAGCCAuGGcGuuATT B | 2115 |
| | | | | active | | |
| 140 | UCCCGGGAGAGCCAUAGUGGUCU | 1420 | 47880 | HCVa:(140)U23 siRNA stab07B | B ccGGGAGAGCcAuAGuGGuTT B | 2116 |
| | | | | active | | |
| 157 | UGGUCUGCGGAACCGGUGAGUAC | 1426 | 47881 | HCVa:(157)U23 siRNA stab07B | B GucuGcGGAAccGGuGAGuTT B | 2117 |
| | | | | active | | |
| 303 | UGCCUGAUAGGGUGCUUGCGAGU | 1410 | 47882 | HCVa:(303)U23 siRNA stab07B | B ccuGAuAGGGuGcuuGcGATT B | 2118 |
| | | | | active | | |
| 329 | CCGGGAGGUCUCGUAGACCGUGC | 1419 | 47883 | HCVa:(329)U23 siRNA stab07B | B GGGAGGucUCGuAGAccGuTT B | 2119 |
| | | | | active | | |
| 73 | GUCUUCACGCAGAAAGCGUCUAG | 2017 | 47884 | HCVa:(73)U23 siRNA stab09 | B CUUCACGCAGAAAGCGUCUTT B | 2120 |
| | | | | active | | |
| 86 | AAGCGUCUAGCCAUGGCGUUAGU | 2018 | 47885 | HCVa:(86)U23 siRNA stab09 | B GCGUCUAGCCAUGGCGUUATT B | 2121 |
| | | | | active | | |
| 140 | UCCCGGGAGAGCCAUAGUGGUCU | 1420 | 47886 | HCVa:(140)U23 siRNA stab09 | B CCGGGAGAGCCAUAGUGGUTT B | 2122 |
| | | | | active | | |
| 157 | UGGUCUGCGGAACCGGUGAGUAC | 1426 | 47887 | HCVa:(157)U23 siRNA stab09 | B GUCUGCGGAACCGGUGAGUTT B | 2123 |
| | | | | active | | |
| 303 | UGCCUGAUAGGGUGCUUGCGAGU | 1410 | 47888 | HCVa:(303)U23 siRNA stab09 | B CCUGAUAGGGUGCUUGCGATT B | 2124 |
| | | | | active | | |
| 329 | CCGGGAGGUCUCGUAGACCGUGC | 1419 | 47889 | HCVa:(329)U23 siRNA stab09 | B GGGAGGUCUCGUAGACCGUTT B | 2125 |
| | | | | active | | |
| 73 | GUCUUCACGCAGAAAGCGUCUAG | 2017 | 47890 | HCVa:(73)L21 siRNA stab10 | AGACGCUUUCUGCGUGAAGTsT | 2126 |
| | | | | active | | |
| 86 | AAGCGUCUAGCCAUGGCGUUAGU | 2018 | 47891 | HCVa:(86)L21 siRNA stab10 | UAACGCCAUGGCUAGACGCTsT | 2127 |
| | | | | active | | |
| 140 | UCCCGGGAGAGCCAUAGUGGUCU | 1420 | 47892 | HCVa:(140)L21 siRNA stab10 | ACCACUAUGGCUCUCCCGGTsT | 2128 |
| | | | | active | | |
| 157 | UGGUCUGCGGAACCGGUGAGUAC | 1426 | 47893 | HCVa:(157)L21 siRNA stab10 | ACUCACCGGUUCCGCAGACTsT | 2129 |
| | | | | active | | |
| 303 | UGCCUGAUAGGGUGCUUGCGAGU | 1410 | 47894 | HCVa:(303)L21 siRNA stab10 | UCGCAAGCACCCUAUCAGGTsT | 2130 |
| | | | | active | | |
| 329 | CCGGGAGGUCUCGUAGACCGUGC | 1419 | 47895 | HCVa:(329)L21 siRNA stab10 | ACGGUCUACGAGACCUCCCTsT | 2131 |
| | | | | active | | |
| 73 | GUCUUCACGCAGAAAGCGUCUAG | 2017 | 47896 | HCVa:(73)L21 siRNA stab25 | AGAcGcuuucuGcGuGAAGTsT | 2132 |
| | | | | active | | |
| 86 | AAGCGUCUAGCCAUGGCGUUAGU | 2018 | 47897 | HCVa:(86)L21 siRNA stab25 | uAAcGccAuGGcuAGAcGcTsT | 2133 |
| | | | | active | | |
| 140 | UCCCGGGAGAGCCAUAGUGGUCU | 1420 | 47898 | HCVa:(140)L21 siRNA stab25 | AccAcuAuGGcucucccGGTsT | 2134 |
| | | | | active | | |
| 157 | UGGUCUGCGGAACCGGUGAGUAC | 1426 | 47899 | HCVa:(157)L21 siRNA stab25 | AcucAccGGuuccGcAGAcTsT | 2135 |
| | | | | active | | |
| 303 | UGCCUGAUAGGGUGCUUGCGAGU | 1410 | 47900 | HCVa:(303)L21 siRNA stab25 | ucGcAAGcAcccuAucAGGTsT | 2136 |
| | | | | active | | |
| 329 | CCGGGAGGUCUCGUAGACCGUGC | 1419 | 47901 | HCVa:(329)L21 siRNA stab25 | AcGGucuAcGAGAccucccTsT | 2137 |
| | | | | active | | |
| 316 | CCCCGGGAGGUCUCGUAGACCGU | 1417 | 50721 | HCVa:(316)U23 siRNA | B ccGGGAGGucucGuAGAcBTT B | 2138 |
| | | | | stab07iB19 active | | |
| 293 | GCCUGAUAGGGUGCUUGCGAGUG | 1444 | 50722 | HCVa:(293)U23 siRNA | B cuGAuAGGGuGcuuGcGABTT B | 2139 |
| | | | | stab07iB19 active | | |
| 316 | CCCCGGGAGGUCUCGUAGACCGU | 1417 | 50723 | HCVa:(316)L21 siRNA | GGUcuAcGAGAccucccGBGG | 2140 |
| | | | | stab36iB19 active | | |
| 293 | GCCUGAUAGGGUGCUUGCGAGUG | 1444 | 50724 | HCVa:(293)L21 siRNA | CUCGcAAGcAcccuAucABGC | 2141 |
| | | | | stab36iB19 active | | |
| 316 | CCCCGGGAGGUCUCGUAGACCGU | 1417 | 50725 | HCVa:(316)U23 siRNA | B BcGGGAGGucucGuAGAccTT B | 2142 |
| | | | | stab07iB1 active | | |
| 293 | GCCUGAUAGGGUGCUUGCGAGUG | 1444 | 50726 | HCVa:(293)U23 siRNA | B BuGAuAGGGuGcuuGcGAGTT B | 2143 |
| | | | | stab07iB1 active | | |
| 316 | CCCCGGGAGGUCUCGUAGACCGU | 1417 | 50727 | HCVa:(316)L21 siRNA | B GUcuAcGAGAccucccGGGG | 2144 |
| | | | | stab36iB1 active | | |
| 293 | GCCUGAUAGGGUGCUUGCGAGUG | 1444 | 50728 | HCVa:(293)L21 siRNA | B UCGcAAGcAcccuAucAGGC | 2145 |
| | | | | stab36iB1 active | | |
| 316 | CCCCGGGAGGUCUCGUAGACCGU | 1417 | 50729 | HCVa:(316)U23 siRNA | B ccGGGAGGBcucGuAGAccTT B | 2146 |
| | | | | stab07iB9 active | | |
| 293 | GCCUGAUAGGGUGCUUGCGAGUG | 1444 | 50730 | HCVa:(293)U23 siRNA | B cuGAuAGGBuGcuuGcGAGTT B | 2147 |
| | | | | stab07iB9 active | | |
| 316 | CCCCGGGAGGUCUCGUAGACCGU | 1417 | 50731 | HCVa:(316)L21 siRNA | GGUcuAcGBGAccucccGGGG | 2148 |
| | | | | stab36iB9 active | | |
| 293 | GCCUGAUAGGGUGCUUGCGAGUG | 1444 | 50732 | HCVa:(293)L21 siRNA | CUCGcAAGBAcccuAucAGGC | 2149 |
| | | | | stab36iB9 active | | |

Uppercase = ribonucleotide
u = 2′-deoxy-2′-fluoro uridine
c = 2′-deoxy-2′-fluoro cytidine
g = 2′-deoxy-2′-fluoro guanosine
a = 2′-deoxy-2′-fluoro adenosine
T = thymidine
B = inverted deoxy abasic
s = phosphorothioate linkage
A = deoxy Adenosine
G = deoxy Guanosine
U = deoxy Uridine
C = deoxy Cytidine
G = 2′-O-methyl Guanosine
A = 2′-O-methyl Adenosine
C = 2′-O-methyl Cytidine
U = 2′-O-methyl Uridine
L = hegS = hexethelyne glycol spacer; spacer-18 (Glen Research 10-1918-xx)
p = terminal phosphate

TABLE IV
Non-limiting examples of Stabilization Chemistries for chemically modified
siNA constructs

| Chemistry | pyrimidine | Purine | cap | p = S | Strand |
|---|---|---|---|---|---|
| “Stab 00” | Ribo | Ribo | TT at 3′-ends | | S/AS |
| “Stab 1” | Ribo | Ribo | — | 5 at 5′-end | S/AS |
| | | | | 1 at 3′-end | |
| “Stab 2” | Ribo | Ribo | — | All linkages | Usually AS |
| “Stab 3” | 2′-fluoro | Ribo | — | 4 at 5′-end | Usually S |
| | | | | 4 at 3′-end | |
| “Stab 4” | 2′-fluoro | Ribo | 5′ and 3′-ends | — | Usually S |
| “Stab 5” | 2′-fluoro | Ribo | — | 1 at 3′-end | Usually AS |
| “Stab 6” | 2′-O-Methyl | Ribo | 5′ and 3′-ends | — | Usually S |
| “Stab 7” | 2′-fluoro | 2′-deoxy | 5′ and 3′-ends | — | Usually S |
| “Stab 8” | 2′-fluoro | 2′-O- | — | 1 at 3′-end | S/AS |
| | | Methyl | | | |
| “Stab 9” | Ribo | Ribo | 5′ and 3′-ends | — | Usually S |
| “Stab 10” | Ribo | Ribo | — | 1 at 3′-end | Usually AS |
| “Stab 11” | 2′-fluoro | 2′-deoxy | — | 1 at 3′-end | Usually AS |
| “Stab 12” | 2′-fluoro | LNA | 5′ and 3′-ends | | Usually S |
| “Stab 13” | 2′-fluoro | LNA | | 1 at 3′-end | Usually AS |
| “Stab 14” | 2′-fluoro | 2′-deoxy | | 2 at 5′-end | Usually AS |
| | | | | 1 at 3′-end | |
| “Stab 15” | 2′-deoxy | 2′-deoxy | | 2 at 5′-end | Usually AS |
| | | | | 1 at 3′-end | |
| “Stab 16” | Ribo | 2′-O- | 5′ and 3′- | | Usually S |
| | | Methyl | ends | | |
| “Stab 17” | 2′-O-Methyl | 2′-O- | 5′ and 3′- | | Usually S |
| | | Methyl | ends | | |
| “Stab 18” | 2′-fluoro | 2′-O- | 5′ and 3′- | | Usually S |
| | | Methyl | ends | | |
| “Stab 19” | 2′-fluoro | 2′-O- | 3′-end | | S/AS |
| | | Methyl | | | |
| “Stab 20” | 2′-fluoro | 2′-deoxy | 3′-end | | Usually AS |
| “Stab 21” | 2′-fluoro | Ribo | 3′-end | | Usually AS |
| “Stab 22” | Ribo | Ribo | 3′-end | | Usually AS |
| “Stab 23” | 2′-fluoro* | 2′-deoxy* | 5′ and 3′- | | Usually S |
| | | | ends | | |
| “Stab 24” | 2′-fluoro* | 2′-O- | — | 1 at 3′-end | S/AS |
| | | Methyl* | | | |
| “Stab 25” | 2′-fluoro* | 2′-O- | — | 1 at 3′-end | S/AS |
| | | Methyl* | | | |
| “Stab 26” | 2′-fluoro* | 2′-O- | — | | S/AS |
| | | Methyl* | | | |
| “Stab 27” | 2′-fluoro* | 2′-O- | 3′-end | | S/AS |
| | | Methyl* | | | |
| “Stab 28” | 2′-fluoro* | 2′-O- | 3′-end | | S/AS |
| | | Methyl* | | | |
| “Stab 29” | 2′-fluoro* | 2′-O- | | 1 at 3′-end | S/AS |
| | | Methyl* | | | |
| “Stab 30” | 2′-fluoro* | 2′-O- | | | S/AS |
| | | Methyl* | | | |
| “Stab 31” | 2′-fluoro* | 2′-O- | 3′-end | | S/AS |
| | | Methyl* | | | |
| “Stab 32” | 2′-fluoro | 2′-O- | | | S/AS |
| | | Methyl | | | |
| “Stab 33” | 2′-fluoro | 2′-deoxy* | 5′ and 3′- | — | Usually S |
| | | | ends | | |
| “Stab 34” | 2′-fluoro | 2′-O- | 5′ and 3′- | | Usually S |
| | | Methyl* | ends | | |
| “Stab 35” | 2′-fluoro** | 2′-O- | | | Usually AS |
| | | Methyl** | | | |
| “Stab 36” | 2′-fluoro** | 2′-O- | | | Usually AS |
| | | Methyl** | | | |
| “Stab 3F” | 2′-OCF3 | Ribo | — | 4 at 5′-end | Usually S |
| | | | | 4 at 3′-end | |
| “Stab 4F” | 2′-OCF3 | Ribo | 5′ and 3′- | — | Usually S |
| | | | ends | | |
| “Stab 5F” | 2′-OCF3 | Ribo | — | 1 at 3′-end | Usually AS |
| “Stab 7F” | 2′-OCF3 | 2′-deoxy | 5′ and 3′- | — | Usually S |
| | | | ends | | |
| “Stab 8F” | 2′-OCF3 | 2′-O- | — | 1 at 3′-end | S/AS |
| | | Methyl | | | |
| “Stab 11F” | 2′-OCF3 | 2′-deoxy | — | 1 at 3′-end | Usually AS |
| “Stab 12F” | 2′-OCF3 | LNA | 5′ and 3′- | | Usually S |
| | | | ends | | |
| “Stab 13F” | 2′-OCF3 | LNA | | 1 at 3′-end | Usually AS |
| “Stab 14F” | 2′-OCF3 | 2′-deoxy | | 2 at 5′-end | Usually AS |
| | | | | 1 at 3′-end | |
| “Stab 15F” | 2′-OCF3 | 2′-deoxy | | 2 at 5′-end | Usually AS |
| | | | | 1 at 3′-end | |
| “Stab 18F” | 2′-OCF3 | 2′-O- | 5′ and 3′- | | Usually S |
| | | Methyl | ends | | |
| “Stab 19F” | 2′-OCF3 | 2′-O- | 3′-end | | S/AS |
| | | Methyl | | | |
| “Stab 20F” | 2′-OCF3 | 2′-deoxy | 3′-end | | Usually AS |
| “Stab 21F” | 2′-OCF3 | Ribo | 3′-end | | Usually AS |
| “Stab 23F” | 2′-OCF3* | 2′-deoxy* | 5′ and 3′- | | Usually S |
| | | | ends | | |
| “Stab 24F” | 2′-OCF3* | 2′-O- | — | 1 at 3′-end | S/AS |
| | | Methyl* | | | |
| “Stab 25F” | 2′-OCF3* | 2′-O- | — | 1 at 3′-end | S/AS |
| | | Methyl* | | | |
| “Stab 26F” | 2′-OCF3* | 2′-O- | — | | S/AS |
| | | Methyl* | | | |
| “Stab 27F” | 2′-OCF3* | 2′-O- | 3′-end | | S/AS |
| | | Methyl* | | | |
| “Stab 28F” | 2′-OCF3* | 2′-O- | 3′-end | | S/AS |
| | | Methyl* | | | |
| “Stab 29F” | 2′-OCF3* | 2′-O- | | 1 at 3′-end | S/AS |
| | | Methyl* | | | |
| “Stab 30F” | 2′-OCF3* | 2′-O- | | | S/AS |
| | | Methyl* | | | |
| “Stab 31F” | 2′-OCF3* | 2′-O- | 3′-end | | S/AS |
| | | Methyl* | | | |
| “Stab 32F” | 2′-OCF3 | 2′-O- | | | S/AS |
| | | Methyl | | | |
| “Stab 33F” | 2′-OCF3 | 2′-deoxy* | 5′ and 3′- | — | Usually S |
| | | | ends | | |
| “Stab 34F” | 2′-OCF3 | 2′-O- | 5′ and 3′- | | Usually S |
| | | Methyl* | ends | | |
| “Stab 35F” | 2′-OCF3*† | 2′-O- | | | Usually AS |
| | | Methyl*† | | | |
| “Stab 36F” | 2′-OCF3*† | 2′-O- | | | Usually AS |
| | | Methyl*† | | | |

CAP = any terminal cap, see for example FIG. 10.
All Stab 00-34 chemistries can comprise 3′-terminal thymidine (TT) residues
All Stab 00-34 chemistries typically comprise about 21 nucleotides, but can vary as described herein.
All Stab 00-36 chemistries can also include a single ribonucleotide in the sense or passenger strand at the 11^{th} base paired position of the double stranded nucleic acid duplex as determined from the 5′-end of the antisense or guide strand (see FIG. 6C)
S = sense strand
AS = antisense strand
*Stab 23 has a single ribonucleotide adjacent to 3′-CAP
*Stab 24 and Stab 28 have a single ribonucleotide at 5′-terminus
*Stab 25, Stab 26, Stab 27, Stab 35 and Stab 36 have three ribonucleotides at 5′-terminus
*Stab 29, Stab 30, Stab 31, Stab 33, and Stab 34 any purine at first three nucleotide positions from 5′-terminus are ribonucleotides
p = phosphorothioate linkage
†Stab 35 has 2′-O-methyl U at 3′-overhangs and three ribonucleotides at 5′-terminus
†Stab 36 has 2′-O-methyl overhangs that are complementary to the target sequence (naturually occurring overhangs) and three ribonucleotides at 5′-terminus

TABLE V

| | | | | | |
|---|---|---|---|---|---|
| Reagent | Equivalents | Amount | Wait Time* DNA | Wait Time* 2′-O-methyl | Wait Time* RNA |

A. 2.5 μmol Synthesis Cycle ABI 394 Instrument

| | | | | | |
|---|---|---|---|---|---|
| Phosphoramidites | 6.5 | 163 μL | 45 sec | 2.5 min | 7.5 min |
| S-Ethyl Tetrazole | 23.8 | 238 μL | 45 sec | 2.5 min | 7.5 min |
| Acetic Anhydride | 100 | 233 μL | 5 sec | 5 sec | 5 sec |
| N-Methyl | 186 | 233 μL | 5 sec | 5 sec | 5 sec |
| Imidazole | | | | | |
| TCA | 176 | 2.3 mL | 21 sec | 21 sec | 21 sec |
| Iodine | 11.2 | 1.7 mL | 45 sec | 45 sec | 45 sec |
| Beaucage | 12.9 | 645 μL | 100 sec | 300 sec | 300 sec |
| Acetonitrile | NA | 6.67 mL | NA | NA | NA |

B. 0.2 μmol Synthesis Cycle ABI 394 Instrument

| | | | | | |
|---|---|---|---|---|---|
| Phosphoramidites | 15 | 31 μL | 45 sec | 233 sec | 465 sec |
| S-Ethyl Tetrazole | 38.7 | 31 μL | 45 sec | 233 min | 465 sec |
| Acetic Anhydride | 655 | 124 μL | 5 sec | 5 sec | 5 sec |
| N-Methyl | 1245 | 124 μL | 5 sec | 5 sec | 5 sec |
| Imidazole | | | | | |
| TCA | 700 | 732 μL | 10 sec | 10 sec | 10 sec |
| Iodine | 20.6 | 244 μL | 15 sec | 15 sec | 15 sec |
| Beaucage | 7.7 | 232 μL | 100 sec | 300 sec | 300 sec |
| Acetonitrile | NA | 2.64 mL | NA | NA | NA |

C. 0.2 μmol Synthesis Cycle 96 well Instrument

| | Equivalents: DNA/ | Amount: DNA/2′-O- | | Wait Time* 2′-O- | |
|---|---|---|---|---|---|
| Reagent | 2′-O-methyl/Ribo | methyl/Ribo | Wait Time* DNA | methyl | Wait Time* Ribo |
| Phosphoramidites | 22/33/66 | 40/60/120 μL | 60 sec | 180 sec | 360 sec |
| S-Ethyl Tetrazole | 70/105/210 | 40/60/120 μL | 60 sec | 180 min | 360 sec |
| Acetic Anhydride | 265/265/265 | 50/50/50 μL | 10 sec | 10 sec | 10 sec |
| N-Methyl | 502/502/502 | 50/50/50 μL | 10 sec | 10 sec | 10 sec |
| Imidazole | | | | | |
| TCA | 238/475/475 | 250/500/500 μL | 15 sec | 15 sec | 15 sec |
| Iodine | 6.8/6.8/6.8 | 80/80/80 μL | 30 sec | 30 sec | 30 sec |
| Beaucage | 34/51/51 | 80/120/120 | 100 sec | 200 sec | 200 sec |
| Acetonitrile | NA | 1150/1150/1150 μL | NA | NA | NA |

Wait time does not include contact time during delivery.
Tandem synthesis utilizes double coupling of linker molecule

TABLE VI
Lipid Nanoparticle (LNP) Formulations

| Formulation | | |
|---|---|---|
| # | Composition | Molar Ratio |
| L051 | CLinDMA/DSPC/Chol/PEG-n-DMG | 48/40/10/2 |
| L053 | DMOBA/DSPC/Chol/PEG-n-DMG | 30/20/48/2 |
| L054 | DMOBA/DSPC/Chol/PEG-n-DMG | 50/20/28/2 |
| L069 | CLinDMA/DSPC/Cholesterol/PEG- | 48/40/10/2 |
| | Cholesterol | |
| L073 | pCLinDMA or CLin DMA/DMOBA/ | 25/25/20/28/2 |
| | DSPC/Chol/PEG-n-DMG | |
| L077 | eCLinDMA/DSPC/Cholesterol/ | 48/40/10/2 |
| | 2KPEG-Chol | |
| L080 | eCLinDMA/DSPC/Cholesterol/ | 48/40/10/2 |
| | 2KPEG-DMG | |
| L082 | pCLinDMA/DSPC/Cholesterol/ | 48/40/10/2 |
| | 2KPEG-DMG | |
| L083 | pCLinDMA/DSPC/Cholesterol/ | 48/40/10/2 |
| | 2KPEG-Chol | |
| L086 | CLinDMA/DSPC/Cholesterol/2KPEG- | 43/38/10/2/7 |
| | DMG/Linoleyl alcohol | |
| L061 | DMLBA/Cholesterol/2KPEG-DMG | 52/45/3 |
| L060 | DMOBA/Cholesterol/2KPEG-DMG N/P | 52/45/3 |
| | ratio of 5 | |
| L097 | DMLBA/DSPC/Cholesterol/2KPEG- | 50/20/28 |
| | DMG | |
| L098 | DMOBA/Cholesterol/2KPEG-DMG, | 52/45/3 |
| | N/P ratio of 3 | |
| L099 | DMOBA/Cholesterol/2KPEG-DMG, | 52/45/3 |
| | N/P ratio of 4 | |
| L100 | DMOBA/DOBA/3% PEG-DMG, N/P | 52/45/3 |
| | ratio of 3 | |
| L101 | DMOBA/Cholesterol/2KPEG- | 52/45/3 |
| | Cholesterol | |
| L102 | DMOBA/Cholesterol/2KPEG- | 52/45/3 |
| | Cholesterol, N/P ratio of 5 | |
| L103 | DMLBA/Cholesterol/2KPEG- | 52/45/3 |
| | Cholesterol | |
| L104 | CLinDMA/DSPC/Cholesterol/2KPEG- | 43/38/10/2/7 |
| | cholesterol/Linoleyl alcohol | |
| L105 | DMOBA/Cholesterol/2KPEG-Chol, N/P | 52/45/3 |
| | ratio of 2 | |
| L106 | DMOBA/Cholesterol/2KPEG-Chol, N/P | 67/30/3 |
| | ratio of 3 | |
| L107 | DMOBA/Cholesterol/2KPEG-Chol, N/P | 52/45/3 |
| | ratio of 1.5 | |
| L108 | DMOBA/Cholesterol/2KPEG-Chol, N/P | 67/30/3 |
| | ratio of 2 | |
| L109 | DMOBA/DSPC/Cholesterol/2KPEG- | 50/20/28/2 |
| | Chol, N/P ratio of 2 | |
| L110 | DMOBA/Cholesterol/2KPEG-DMG, | 52/45/3 |
| | N/P ratio of 1.5 | |
| L111 | DMOBA/Cholesterol/2KPEG-DMG, | 67/30/3 |
| | N/P ratio of 1.5 | |
| L112 | DMLBA/Cholesterol/2KPEG-DMG, N/P | 52/45/3 |
| | ratio of 1.5 | |
| L113 | DMLBA/Cholesterol/2KPEG-DMG, N/P | 67/30/3 |
| | ratio of 1.5 | |
| L114 | DMOBA/Cholesterol/2KPEG-DMG, | 52/45/3 |
| | N/P ratio of 2 | |
| L115 | DMOBA/Cholesterol/2KPEG-DMG, | 67/30/3 |
| | N/P ratio of 2 | |
| L116 | DMLBA/Cholesterol/2KPEG-DMG, | 52/45/3 |
| | N/Pratio of 2 | |
| L117 | DMLBA/Cholesterol/2KPEG-DMG, N/P | 52/45/3 |
| | ratio of 2 | |

N/P ratio = Nitrogen:Phosphorous ratio between cationic lipid and nucleic acid

### CLinDMA Structure

[chemical structure]

pCLinDMA Structure

[chemical structure]

eCLinDMA Structure

[chemical structure]

### PEG-n-DMG Structure

[chemical structure]

### DMOBA Structure

[chemical structure]

### DMLBA Structure

[chemical structure]

### DOBA Structure

[chemical structure]

### DSPC

[chemical structure]

### Cholesterol

[chemical structure]

### 2KPEG-Cholesterol

[chemical structure]

### 2KPEG-DMG

[chemical structure]

TABLE VII

| Description of pattern | Pattern # | Score |
|---|---|---|
| G or C at position 1 | 1 | 5 |
| A or U at position 19 | 2 | 10 |
| A/U rich between position 15-19 | 3 | 10 |
| String of 4 Gs or 4 Cs (not preferred) | 4 | −100 |
| G/C rich between position 1-5 | 5 | 10 |
| A or U at position 18 | 6 | 5 |
| A or U at position 10 | 7 | 10 |
| G at position 13 (not preferred) | 8 | −3 |
| A at position 13 | 9 | 3 |
| G at position 9 (not preferred) | 10 | −3 |
| A at position 9 | 11 | 3 |
| A or U at position 14 | 12 | 10 |

Sirna algorithm describing patterns with their relative score for predicting hyper-active siNAs. All the positions given are for the sense strand of 19-mer siNA.

What we claim is:

1. A composition comprising a first double stranded nucleic and a second double stranded nucleic acid molecule each having a first strand and a second strand that are complementary to each other, wherein the second strand of said first double stranded nucleic acid molecule comprises sequence of between 15 to 30 nucleotides that are complementary to HCV sequence comprising SEQ ID NO: 1444 and the second strand of said second double stranded nucleic acid molecule comprises sequence of between 15 to 30 nucleotides that are complementary to HCV sequence comprising SEQ ID NO: 1417.

2. The composition of claim 1, further comprising a cationic lipid, a neutral lipid, and a polyethyleneglycol-conjugate.

3. The composition of claim 1, further comprising a cationic lipid, a neutral lipid, a polyethyleneglycol-conjugate, and a cholesterol.

4. The composition of claim 1, further comprising a cationic lipid, a neutral lipid, a polyethyleneglycol-conjugate, a cholesterol, and a surfactant.

5. The composition of claim 2, wherein said cationic lipid is selected from the group consisting of CLinDMA, pCLinDMA, eCLinDMA, DMOBA, and DMLBA.

6. The composition of claim 3, wherein said cationic lipid is selected from the group consisting of CLinDMA, pCLinDMA, eCLinDMA, DMOBA, and DMLBA.

7. The composition of claim 4, wherein said cationic lipid is selected from the group consisting of CLinDMA, pCLinDMA, eCLinDMA, DMOBA, and DMLBA.

8. The composition of claim 2, wherein said neutral lipid is selected from the group consisting of DSPC, DOBA, and cholesterol.

9. The composition of claim 3, wherein said neutral lipid is selected from the group consisting of DSPC, DOBA, and cholesterol.

10. The composition of claim 4, wherein said neutral lipid is selected from the group consisting of DSPC, DOBA, and cholesterol.

11. The composition of claim 2, wherein said polyethyleneglycol-conjugate is selected from the group consisting of a PEG-dimyristoyl glycerol and PEG-cholesterol.

12. The composition of claim 3, wherein said polyethyleneglycol-conjugate is selected from the group consisting of a PEG-dimyristoyl glycerol and PEG-cholesterol.

13. The composition of claim 4, wherein said polyethyleneglycol-conjugate is selected from the group consisting of a PEG-dimyristoyl glycerol and PEG-cholesterol.

14. The composition of claim 13, wherein said PEG is 2KPEG.

15. The composition of claim 4, wherein said surfactant is selected from the group consisting of palmityl alcohol, stearyl alcohol, oleyl alcohol and linoleyl alcohol.

16. The composition of claim 4, wherein said cationic lipid is CLinDMA, said neutral lipid is DSPC, said polyethylene glycol conjugate is 2KPEG-DMG, said cholesterol is cholesterol, and said surfactant is linoleyl alcohol.

17. The composition of claim 16, wherein said CLinDMA, said DSPC, said 2KPEG-DMG, said cholesterol, and said linoleyl alcohol are present in molar ratio of 43:38:10:2:7 respectively.

18. The composition of claim 1, wherein said first strand and said second strand of said first double stranded nucleic acid molecule comprise SEQ ID NOs: 1796 and 2102 respectively, and said first strand and said second strand of said second double stranded nucleic acid molecule comprise SEQ ID NOs: 1677 and 2103 respectively.

19. The composition of claim 1, wherein said first strand and said second strand of said first double stranded nucleic acid molecule comprise SEQ ID NOs: 1796 and 2010 respectively, and said first strand and said second strand of said second double stranded nucleic acid molecule comprise SEQ ID NOs: 1677 and 2011 respectively.

20. The composition of claim 1, wherein said first strand and said second strand of said first double stranded nucleic acid molecule comprise SEQ ID NOs: 1796 and 2012 respectively, and said first strand and said second strand of said second double stranded nucleic acid molecule comprise SEQ ID NOs: 1677 and 2013 respectively.

21. A composition comprising the composition of claim 18 in a pharmaceutically acceptable carrier or diluent.

22. A composition comprising the composition of claim 19 in a pharmaceutically acceptable carrier or diluent.

23. A composition comprising the composition of claim 20 in a pharmaceutically acceptable carrier or diluent.

The application's sequence listing, which the Patent Office published only in electronic form, follows.

SEQUENCE LISTING (2176 sequences)

SEQ ID NO: 1 - RNA, 19 nt, Artificial Sequence
  Description of Artificial Sequence: Target Sequence/siNA sense region
gccccgggaggucucguag

SEQ ID NO: 2 - RNA, 19 nt, Artificial Sequence
  Description of Artificial Sequence: Target Sequence/siNA sense region
ugugguacugccugauagg

SEQ ID NO: 3 - RNA, 19 nt, Artificial Sequence
  Description of Artificial Sequence: Target Sequence/siNA sense region
uugugguacugccugauag

SEQ ID NO: 4 - RNA, 19 nt, Artificial Sequence
  Description of Artificial Sequence: Target Sequence/siNA sense region
ccccgggaggucucguaga

SEQ ID NO: 5 - RNA, 19 nt, Artificial Sequence
  Description of Artificial Sequence: Target Sequence/siNA sense region
gugguacugccugauaggg

SEQ ID NO: 6 - RNA, 19 nt, Artificial Sequence
  Description of Artificial Sequence: Target Sequence/siNA sense region
cugccugauagggugcuug

SEQ ID NO: 7 - RNA, 19 nt, Artificial Sequence
  Description of Artificial Sequence: Target Sequence/siNA sense region
ccuugugguacugccugau

SEQ ID NO: 8 - RNA, 19 nt, Artificial Sequence
  Description of Artificial Sequence: Target Sequence/siNA sense region
gcgaaaggccuugugguac

SEQ ID NO: 9 - RNA, 19 nt, Artificial Sequence
  Description of Artificial Sequence: Target Sequence/siNA sense region
uacugccugauagggugcu

SEQ ID NO: 10 - RNA, 19 nt, Artificial Sequence
  Description of Artificial Sequence: Target Sequence/siNA sense region
gguacugccugauagggug

SEQ ID NO: 11 - RNA, 19 nt, Artificial Sequence
  Description of Artificial Sequence: Target Sequence/siNA sense region
aaaggccuugugguacugc

SEQ ID NO: 12 - RNA, 19 nt, Artificial Sequence
  Description of Artificial Sequence: Target Sequence/siNA sense region
aaggccuugugguacugcc

SEQ ID NO: 13 - RNA, 19 nt, Artificial Sequence
  Description of Artificial Sequence: Target Sequence/siNA sense region
cuugugguacugccugaua

SEQ ID NO: 14 - RNA, 19 nt, Artificial Sequence
  Description of Artificial Sequence: Target Sequence/siNA sense region
aggccuugugguacugccu

SEQ ID NO: 15 - RNA, 19 nt, Artificial Sequence
  Description of Artificial Sequence: Target Sequence/siNA sense region
guacugccugauagggugc

SEQ ID NO: 16 - RNA, 19 nt, Artificial Sequence
  Description of Artificial Sequence: Target Sequence/siNA sense region
acugccugauagggugcuu

SEQ ID NO: 17 - RNA, 19 nt, Artificial Sequence
  Description of Artificial Sequence: Target Sequence/siNA sense region
cuugcgagugccccgggag

SEQ ID NO: 18 - RNA, 19 nt, Artificial Sequence
  Description of Artificial Sequence: Target Sequence/siNA sense region
cugauagggugcuugcgag

SEQ ID NO: 19 - RNA, 19 nt, Artificial Sequence
  Description of Artificial Sequence: Target Sequence/siNA sense region
uugcgagugccccgggagg

SEQ ID NO: 20 - RNA, 19 nt, Artificial Sequence
  Description of Artificial Sequence: Target Sequence/siNA sense region
ccugauagggugcuugcga

SEQ ID NO: 21 - RNA, 19 nt, Artificial Sequence
  Description of Artificial Sequence: Target Sequence/siNA sense region
ggccuugugguacugccug

SEQ ID NO: 22 - RNA, 19 nt, Artificial Sequence
  Description of Artificial Sequence: Target Sequence/siNA sense region
gcuugcgagugccccggga

SEQ ID NO: 23 - RNA, 19 nt, Artificial Sequence
  Description of Artificial Sequence: Target Sequence/siNA sense region
ugccugauagggugcuugc

SEQ ID NO: 24 - RNA, 19 nt, Artificial Sequence
  Description of Artificial Sequence: Target Sequence/siNA sense region
gaaaggccuugugguacug

SEQ ID NO: 25 - RNA, 19 nt, Artificial Sequence
  Description of Artificial Sequence: Target Sequence/siNA sense region
gccugauagggugcuugcg

SEQ ID NO: 26 - RNA, 19 nt, Artificial Sequence
  Description of Artificial Sequence: Target Sequence/siNA sense region
cgaaaggccuugugguacu

SEQ ID NO: 27 - RNA, 19 nt, Artificial Sequence
  Description of Artificial Sequence: Target Sequence/siNA sense region
gccuugugguacugccuga

SEQ ID NO: 28 - RNA, 19 nt, Artificial Sequence
  Description of Artificial Sequence: Target Sequence/siNA sense region
gagugccccgggaggucuc

SEQ ID NO: 29 - RNA, 19 nt, Artificial Sequence
  Description of Artificial Sequence: Target Sequence/siNA sense region
cccgggaggucucguagac

SEQ ID NO: 30 - RNA, 19 nt, Artificial Sequence
  Description of Artificial Sequence: Target Sequence/siNA sense region
ugcgagugccccgggaggu

SEQ ID NO: 31 - RNA, 19 nt, Artificial Sequence
  Description of Artificial Sequence: Target Sequence/siNA sense region
ugguacugccugauagggu

SEQ ID NO: 32 - RNA, 19 nt, Artificial Sequence
  Description of Artificial Sequence: Target Sequence/siNA sense region
ccggugaguacaccggaau

SEQ ID NO: 33 - RNA, 19 nt, Artificial Sequence
  Description of Artificial Sequence: Target Sequence/siNA sense region
gcgagugccccgggagguc

SEQ ID NO: 34 - RNA, 19 nt, Artificial Sequence
  Description of Artificial Sequence: Target Sequence/siNA sense region
cgagugccccgggaggucu

SEQ ID NO: 35 - RNA, 19 nt, Artificial Sequence
  Description of Artificial Sequence: Target Sequence/siNA sense region
ugccccgggaggucucgua

SEQ ID NO: 36 - RNA, 19 nt, Artificial Sequence
  Description of Artificial Sequence: Target Sequence/siNA sense region
gugccccgggaggucucgu

SEQ ID NO: 37 - RNA, 19 nt, Artificial Sequence
  Description of Artificial Sequence: Target Sequence/siNA sense region
agugccccgggaggucucg

SEQ ID NO: 38 - RNA, 19 nt, Artificial Sequence
  Description of Artificial Sequence: Target Sequence/siNA sense region
ccgggaggucucguagacc

SEQ ID NO: 39 - RNA, 19 nt, Artificial Sequence
  Description of Artificial Sequence: Target Sequence/siNA sense region
ugauagggugcuugcgagu

SEQ ID NO: 40 - RNA, 19 nt, Artificial Sequence
  Description of Artificial Sequence: Target Sequence/siNA sense region
gugcuugcgagugccccgg

SEQ ID NO: 41 - RNA, 19 nt, Artificial Sequence
  Description of Artificial Sequence: Target Sequence/siNA sense region
auagggugcuugcgagugc

SEQ ID NO: 42 - RNA, 19 nt, Artificial Sequence
  Description of Artificial Sequence: Target Sequence/siNA sense region
gggugcuugcgagugcccc

SEQ ID NO: 43 - RNA, 19 nt, Artificial Sequence
  Description of Artificial Sequence: Target Sequence/siNA sense region
cgggaggucucguagaccg

SEQ ID NO: 44 - RNA, 19 nt, Artificial Sequence
  Description of Artificial Sequence: Target Sequence/siNA sense region
gggaggucucguagaccgu

SEQ ID NO: 45 - RNA, 19 nt, Artificial Sequence
  Description of Artificial Sequence: Target Sequence/siNA sense region
gauagggugcuugcgagug

SEQ ID NO: 46 - RNA, 19 nt, Artificial Sequence
  Description of Artificial Sequence: Target Sequence/siNA sense region
ggaggucucguagaccgug

SEQ ID NO: 47 - RNA, 19 nt, Artificial Sequence
  Description of Artificial Sequence: Target Sequence/siNA sense region
agggugcuugcgagugccc

SEQ ID NO: 48 - RNA, 19 nt, Artificial Sequence
  Description of Artificial Sequence: Target Sequence/siNA sense region
ugcuugcgagugccccggg

SEQ ID NO: 49 - RNA, 19 nt, Artificial Sequence
  Description of Artificial Sequence: Target Sequence/siNA sense region
ggugcuugcgagugccccg

SEQ ID NO: 50 - RNA, 19 nt, Artificial Sequence
  Description of Artificial Sequence: Target Sequence/siNA sense region
uagggugcuugcgagugcc

SEQ ID NO: 51 - RNA, 19 nt, Artificial Sequence
  Description of Artificial Sequence: Target Sequence/siNA sense region
aggucucguagaccgugca

SEQ ID NO: 52 - RNA, 19 nt, Artificial Sequence
  Description of Artificial Sequence: Target Sequence/siNA sense region
gaggucucguagaccgugc

SEQ ID NO: 53 - RNA, 19 nt, Artificial Sequence
  Description of Artificial Sequence: Target Sequence/siNA sense region
ggaaccggugaguacaccg

SEQ ID NO: 54 - RNA, 19 nt, Artificial Sequence
  Description of Artificial Sequence: Target Sequence/siNA sense region
cggaaccggugaguacacc

SEQ ID NO: 55 - RNA, 19 nt, Artificial Sequence
  Description of Artificial Sequence: Target Sequence/siNA sense region
cggugaguacaccggaauu

SEQ ID NO: 56 - RNA, 19 nt, Artificial Sequence
  Description of Artificial Sequence: Target Sequence/siNA sense region
gcggaaccggugaguacac

SEQ ID NO: 57 - RNA, 19 nt, Artificial Sequence
  Description of Artificial Sequence: Target Sequence/siNA sense region
aaccggugaguacaccgga

SEQ ID NO: 58 - RNA, 19 nt, Artificial Sequence
  Description of Artificial Sequence: Target Sequence/siNA sense region
accggugaguacaccggaa

SEQ ID NO: 59 - RNA, 19 nt, Artificial Sequence
  Description of Artificial Sequence: Target Sequence/siNA sense region
cugcggaaccggugaguac

SEQ ID NO: 60 - RNA, 19 nt, Artificial Sequence
  Description of Artificial Sequence: Target Sequence/siNA sense region
gucugcggaaccggugagu

SEQ ID NO: 61 - RNA, 19 nt, Artificial Sequence
  Description of Artificial Sequence: Target Sequence/siNA sense region
gaaccggugaguacaccgg

SEQ ID NO: 62 - RNA, 19 nt, Artificial Sequence
  Description of Artificial Sequence: Target Sequence/siNA sense region
ugcggaaccggugaguaca

SEQ ID NO: 63 - RNA, 19 nt, Artificial Sequence
  Description of Artificial Sequence: Target Sequence/siNA sense region
ucugcggaaccggugagua

SEQ ID NO: 64 - RNA, 19 nt, Artificial Sequence
  Description of Artificial Sequence: Target Sequence/siNA sense region
gggagagccauaguggucu

SEQ ID NO: 65 - RNA, 19 nt, Artificial Sequence
  Description of Artificial Sequence: Target Sequence/siNA sense region
guggucugcggaaccggug

SEQ ID NO: 66 - RNA, 19 nt, Artificial Sequence
  Description of Artificial Sequence: Target Sequence/siNA sense region
ggucugcggaaccggugag

SEQ ID NO: 67 - RNA, 19 nt, Artificial Sequence
  Description of Artificial Sequence: Target Sequence/siNA sense region
cgggagagccauagugguc

SEQ ID NO: 68 - RNA, 19 nt, Artificial Sequence
  Description of Artificial Sequence: Target Sequence/siNA sense region
ccgggagagccauaguggu

SEQ ID NO: 69 - RNA, 19 nt, Artificial Sequence
  Description of Artificial Sequence: Target Sequence/siNA sense region
uggucugcggaaccgguga

SEQ ID NO: 70 - RNA, 19 nt, Artificial Sequence
  Description of Artificial Sequence: Target Sequence/siNA sense region
gugaguacaccggaauugc

SEQ ID NO: 71 - RNA, 19 nt, Artificial Sequence
  Description of Artificial Sequence: Target Sequence/siNA sense region
ugaguacaccggaauugcc

SEQ ID NO: 72 - RNA, 19 nt, Artificial Sequence
  Description of Artificial Sequence: Target Sequence/siNA sense region
ggugaguacaccggaauug

SEQ ID NO: 73 - RNA, 19 nt, Artificial Sequence
  Description of Artificial Sequence: Target Sequence/siNA sense region
gagccauaguggucugcgg

SEQ ID NO: 74 - RNA, 19 nt, Artificial Sequence
  Description of Artificial Sequence: Target Sequence/siNA sense region
agagccauaguggucugcg

SEQ ID NO: 75 - RNA, 19 nt, Artificial Sequence
  Description of Artificial Sequence: Target Sequence/siNA sense region
uaguggucugcggaaccgg

SEQ ID NO: 76 - RNA, 19 nt, Artificial Sequence
  Description of Artificial Sequence: Target Sequence/siNA sense region
auaguggucugcggaaccg

SEQ ID NO: 77 - RNA, 19 nt, Artificial Sequence
  Description of Artificial Sequence: Target Sequence/siNA sense region
gagagccauaguggucugc

SEQ ID NO: 78 - RNA, 19 nt, Artificial Sequence
  Description of Artificial Sequence: Target Sequence/siNA sense region
gccauaguggucugcggaa

SEQ ID NO: 79 - RNA, 19 nt, Artificial Sequence
  Description of Artificial Sequence: Target Sequence/siNA sense region
aguggucugcggaaccggu

SEQ ID NO: 80 - RNA, 19 nt, Artificial Sequence
  Description of Artificial Sequence: Target Sequence/siNA sense region
cauaguggucugcggaacc

SEQ ID NO: 81 - RNA, 19 nt, Artificial Sequence
  Description of Artificial Sequence: Target Sequence/siNA sense region
agccauaguggucugcgga

SEQ ID NO: 82 - RNA, 19 nt, Artificial Sequence
  Description of Artificial Sequence: Target Sequence/siNA sense region
ccauaguggucugcggaac

SEQ ID NO: 83 - RNA, 19 nt, Artificial Sequence
  Description of Artificial Sequence: Target Sequence/siNA sense region
ccccucccgggagagccau

SEQ ID NO: 84 - RNA, 19 nt, Artificial Sequence
  Description of Artificial Sequence: Target Sequence/siNA sense region
ggagagccauaguggucug

SEQ ID NO: 85 - RNA, 19 nt, Artificial Sequence
  Description of Artificial Sequence: Target Sequence/siNA sense region
cccgggagagccauagugg

SEQ ID NO: 86 - RNA, 19 nt, Artificial Sequence
  Description of Artificial Sequence: Target Sequence/siNA sense region
cccccucccgggagagcca

SEQ ID NO: 87 - RNA, 19 nt, Artificial Sequence
  Description of Artificial Sequence: Target Sequence/siNA sense region
ucccgggagagccauagug

SEQ ID NO: 88 - RNA, 19 nt, Artificial Sequence
  Description of Artificial Sequence: Target Sequence/siNA sense region
ccccccucccgggagagcc

SEQ ID NO: 89 - RNA, 19 nt, Artificial Sequence
  Description of Artificial Sequence: Target Sequence/siNA sense region
cccucccgggagagccaua

SEQ ID NO: 90 - RNA, 19 nt, Artificial Sequence
  Description of Artificial Sequence: Target Sequence/siNA sense region
ccucccgggagagccauag

SEQ ID NO: 91 - RNA, 19 nt, Artificial Sequence
  Description of Artificial Sequence: Target Sequence/siNA sense region
cucccgggagagccauagu

SEQ ID NO: 92 - RNA, 19 nt, Artificial Sequence
  Description of Artificial Sequence: Target Sequence/siNA sense region
uguugccgcgcaggggccc

SEQ ID NO: 93 - RNA, 19 nt, Artificial Sequence
  Description of Artificial Sequence: Target Sequence/siNA sense region
cccccccucccgggagagc

SEQ ID NO: 94 - RNA, 19 nt, Artificial Sequence
  Description of Artificial Sequence: Target Sequence/siNA sense region
cauggcguuaguaugagug

SEQ ID NO: 95 - RNA, 19 nt, Artificial Sequence
  Description of Artificial Sequence: Target Sequence/siNA sense region
uagccauggcguuaguaug

SEQ ID NO: 96 - RNA, 19 nt, Artificial Sequence
  Description of Artificial Sequence: Target Sequence/siNA sense region
agccauggcguuaguauga

SEQ ID NO: 97 - RNA, 19 nt, Artificial Sequence
  Description of Artificial Sequence: Target Sequence/siNA sense region
ccauggcguuaguaugagu

SEQ ID NO: 98 - RNA, 19 nt, Artificial Sequence
  Description of Artificial Sequence: Target Sequence/siNA sense region
auggcguuaguaugagugu

SEQ ID NO: 99 - RNA, 19 nt, Artificial Sequence
  Description of Artificial Sequence: Target Sequence/siNA sense region
aagcgucuagccauggcgu

SEQ ID NO: 100 - RNA, 19 nt, Artificial Sequence
  Description of Artificial Sequence: Target Sequence/siNA sense region
gucuagccauggcguuagu

SEQ ID NO: 101 - RNA, 19 nt, Artificial Sequence
  Description of Artificial Sequence: Target Sequence/siNA sense region
aaagcgucuagccauggcg

SEQ ID NO: 102 - RNA, 19 nt, Artificial Sequence
  Description of Artificial Sequence: Target Sequence/siNA sense region
gcgucuagccauggcguua

SEQ ID NO: 103 - RNA, 19 nt, Artificial Sequence
  Description of Artificial Sequence: Target Sequence/siNA sense region
gccauggcguuaguaugag

SEQ ID NO: 104 - RNA, 19 nt, Artificial Sequence
  Description of Artificial Sequence: Target Sequence/siNA sense region
agcgucuagccauggcguu

SEQ ID NO: 105 - RNA, 19 nt, Artificial Sequence
  Description of Artificial Sequence: Target Sequence/siNA sense region
cgucuagccauggcguuag

SEQ ID NO: 106 - RNA, 19 nt, Artificial Sequence
  Description of Artificial Sequence: Target Sequence/siNA sense region
ucuagccauggcguuagua

SEQ ID NO: 107 - RNA, 19 nt, Artificial Sequence
  Description of Artificial Sequence: Target Sequence/siNA sense region
gaaagcgucuagccauggc

SEQ ID NO: 108 - RNA, 19 nt, Artificial Sequence
  Description of Artificial Sequence: Target Sequence/siNA sense region
cuagccauggcguuaguau

SEQ ID NO: 109 - RNA, 19 nt, Artificial Sequence
  Description of Artificial Sequence: Target Sequence/siNA sense region
cacuccccugugaggaacu

SEQ ID NO: 110 - RNA, 19 nt, Artificial Sequence
  Description of Artificial Sequence: Target Sequence/siNA sense region
accucaaagaaaaaccaaa

SEQ ID NO: 111 - RNA, 19 nt, Artificial Sequence
  Description of Artificial Sequence: Target Sequence/siNA sense region
cgcagaaagcgucuagcca

SEQ ID NO: 112 - RNA, 19 nt, Artificial Sequence
  Description of Artificial Sequence: Target Sequence/siNA sense region
ggguaaggucaucgauacc

SEQ ID NO: 113 - RNA, 19 nt, Artificial Sequence
  Description of Artificial Sequence: Target Sequence/siNA sense region
cagaaagcgucuagccaug

SEQ ID NO: 114 - RNA, 19 nt, Artificial Sequence
  Description of Artificial Sequence: Target Sequence/siNA sense region
aaaccucaaagaaaaacca

SEQ ID NO: 115 - RNA, 19 nt, Artificial Sequence
  Description of Artificial Sequence: Target Sequence/siNA sense region
gcagaaagcgucuagccau

SEQ ID NO: 116 - RNA, 19 nt, Artificial Sequence
  Description of Artificial Sequence: Target Sequence/siNA sense region
agaaagcgucuagccaugg

SEQ ID NO: 117 - RNA, 19 nt, Artificial Sequence
  Description of Artificial Sequence: Target Sequence/siNA sense region
acgcagaaagcgucuagcc

SEQ ID NO: 118 - RNA, 19 nt, Artificial Sequence
  Description of Artificial Sequence: Target Sequence/siNA sense region
aaccucaaagaaaaaccaa

SEQ ID NO: 119 - RNA, 19 nt, Artificial Sequence
  Description of Artificial Sequence: Target Sequence/siNA sense region
uggguaaggucaucgauac

SEQ ID NO: 120 - RNA, 19 nt, Artificial Sequence
  Description of Artificial Sequence: Target Sequence/siNA sense region
guaaggucaucgauacccu

SEQ ID NO: 121 - RNA, 19 nt, Artificial Sequence
  Description of Artificial Sequence: Target Sequence/siNA sense region
uucacgcagaaagcgucua

SEQ ID NO: 122 - RNA, 19 nt, Artificial Sequence
  Description of Artificial Sequence: Target Sequence/siNA sense region
gguaaggucaucgauaccc

SEQ ID NO: 123 - RNA, 19 nt, Artificial Sequence
  Description of Artificial Sequence: Target Sequence/siNA sense region
aucacuccccugugaggaa

SEQ ID NO: 124 - RNA, 19 nt, Artificial Sequence
  Description of Artificial Sequence: Target Sequence/siNA sense region
ucacuccccugugaggaac

SEQ ID NO: 125 - RNA, 19 nt, Artificial Sequence
  Description of Artificial Sequence: Target Sequence/siNA sense region
ugucuucacgcagaaagcg

SEQ ID NO: 126 - RNA, 19 nt, Artificial Sequence
  Description of Artificial Sequence: Target Sequence/siNA sense region
ucacgcagaaagcgucuag

SEQ ID NO: 127 - RNA, 19 nt, Artificial Sequence
  Description of Artificial Sequence: Target Sequence/siNA sense region
cacgcagaaagcgucuagc

SEQ ID NO: 128 - RNA, 19 nt, Artificial Sequence
  Description of Artificial Sequence: Target Sequence/siNA sense region
gaccggguccuuucuugga

SEQ ID NO: 129 - RNA, 19 nt, Artificial Sequence
  Description of Artificial Sequence: Target Sequence/siNA sense region
gaggaacuacugucuucac

SEQ ID NO: 130 - RNA, 19 nt, Artificial Sequence
  Description of Artificial Sequence: Target Sequence/siNA sense region
cugugaggaacuacugucu

SEQ ID NO: 131 - RNA, 19 nt, Artificial Sequence
  Description of Artificial Sequence: Target Sequence/siNA sense region
ggaacuacugucuucacgc

SEQ ID NO: 132 - RNA, 19 nt, Artificial Sequence
  Description of Artificial Sequence: Target Sequence/siNA sense region
acuccccugugaggaacua

SEQ ID NO: 133 - RNA, 19 nt, Artificial Sequence
  Description of Artificial Sequence: Target Sequence/siNA sense region
gucuucacgcagaaagcgu

SEQ ID NO: 134 - RNA, 19 nt, Artificial Sequence
  Description of Artificial Sequence: Target Sequence/siNA sense region
aggaacuacugucuucacg

SEQ ID NO: 135 - RNA, 19 nt, Artificial Sequence
  Description of Artificial Sequence: Target Sequence/siNA sense region
ccugugaggaacuacuguc

SEQ ID NO: 136 - RNA, 19 nt, Artificial Sequence
  Description of Artificial Sequence: Target Sequence/siNA sense region
ugugaggaacuacugucuu

SEQ ID NO: 137 - RNA, 19 nt, Artificial Sequence
  Description of Artificial Sequence: Target Sequence/siNA sense region
ucuucacgcagaaagcguc

SEQ ID NO: 138 - RNA, 19 nt, Artificial Sequence
  Description of Artificial Sequence: Target Sequence/siNA sense region
gaacuacugucuucacgca

SEQ ID NO: 139 - RNA, 19 nt, Artificial Sequence
  Description of Artificial Sequence: Target Sequence/siNA sense region
cccugugaggaacuacugu

SEQ ID NO: 140 - RNA, 19 nt, Artificial Sequence
  Description of Artificial Sequence: Target Sequence/siNA sense region
cuucacgcagaaagcgucu

SEQ ID NO: 141 - RNA, 19 nt, Artificial Sequence
  Description of Artificial Sequence: Target Sequence/siNA sense region
ugaggaacuacugucuuca

SEQ ID NO: 142 - RNA, 19 nt, Artificial Sequence
  Description of Artificial Sequence: Target Sequence/siNA sense region
uggcguuaguaugaguguc

SEQ ID NO: 143 - RNA, 19 nt, Artificial Sequence
  Description of Artificial Sequence: Target Sequence/siNA sense region
ccccugugaggaacuacug

SEQ ID NO: 144 - RNA, 19 nt, Artificial Sequence
  Description of Artificial Sequence: Target Sequence/siNA sense region
gugaggaacuacugucuuc

SEQ ID NO: 145 - RNA, 19 nt, Artificial Sequence
  Description of Artificial Sequence: Target Sequence/siNA sense region
ggcguuaguaugagugucg

SEQ ID NO: 146 - RNA, 19 nt, Artificial Sequence
  Description of Artificial Sequence: Target Sequence/siNA sense region
gccgaguaguguugggucg

SEQ ID NO: 147 - RNA, 19 nt, Artificial Sequence
  Description of Artificial Sequence: Target Sequence/siNA sense region
acugucuucacgcagaaag

SEQ ID NO: 148 - RNA, 19 nt, Artificial Sequence
  Description of Artificial Sequence: Target Sequence/siNA sense region
ugggucgcgaaaggccuug

SEQ ID NO: 149 - RNA, 19 nt, Artificial Sequence
  Description of Artificial Sequence: Target Sequence/siNA sense region
cuacugucuucacgcagaa

SEQ ID NO: 150 - RNA, 19 nt, Artificial Sequence
  Description of Artificial Sequence: Target Sequence/siNA sense region
cgaguaguguugggucgcg

SEQ ID NO: 151 - RNA, 19 nt, Artificial Sequence
  Description of Artificial Sequence: Target Sequence/siNA sense region
guaguguugggucgcgaaa

SEQ ID NO: 152 - RNA, 19 nt, Artificial Sequence
  Description of Artificial Sequence: Target Sequence/siNA sense region
uaaaccucaaagaaaaacc

SEQ ID NO: 153 - RNA, 19 nt, Artificial Sequence
  Description of Artificial Sequence: Target Sequence/siNA sense region
ccgaguaguguugggucgc

SEQ ID NO: 154 - RNA, 19 nt, Artificial Sequence
  Description of Artificial Sequence: Target Sequence/siNA sense region
agccgaguaguguuggguc

SEQ ID NO: 155 - RNA, 19 nt, Artificial Sequence
  Description of Artificial Sequence: Target Sequence/siNA sense region
gucgcgaaaggccuugugg

SEQ ID NO: 156 - RNA, 19 nt, Artificial Sequence
  Description of Artificial Sequence: Target Sequence/siNA sense region
uaguguugggucgcgaaag

SEQ ID NO: 157 - RNA, 19 nt, Artificial Sequence
  Description of Artificial Sequence: Target Sequence/siNA sense region
cuagccgaguaguguuggg

SEQ ID NO: 158 - RNA, 19 nt, Artificial Sequence
  Description of Artificial Sequence: Target Sequence/siNA sense region
gaguaguguugggucgcga

SEQ ID NO: 159 - RNA, 19 nt, Artificial Sequence
  Description of Artificial Sequence: Target Sequence/siNA sense region
ucgcgaaaggccuuguggu

SEQ ID NO: 160 - RNA, 19 nt, Artificial Sequence
  Description of Artificial Sequence: Target Sequence/siNA sense region
gcguuaguaugagugucgu

SEQ ID NO: 161 - RNA, 19 nt, Artificial Sequence
  Description of Artificial Sequence: Target Sequence/siNA sense region
uagccgaguaguguugggu

SEQ ID NO: 162 - RNA, 19 nt, Artificial Sequence
  Description of Artificial Sequence: Target Sequence/siNA sense region
aacuacugucuucacgcag

SEQ ID NO: 163 - RNA, 19 nt, Artificial Sequence
  Description of Artificial Sequence: Target Sequence/siNA sense region
cgcgaaaggccuuguggua

SEQ ID NO: 164 - RNA, 19 nt, Artificial Sequence
  Description of Artificial Sequence: Target Sequence/siNA sense region
aguguugggucgcgaaagg

SEQ ID NO: 165 - RNA, 19 nt, Artificial Sequence
  Description of Artificial Sequence: Target Sequence/siNA sense region
guugggucgcgaaaggccu

SEQ ID NO: 166 - RNA, 19 nt, Artificial Sequence
  Description of Artificial Sequence: Target Sequence/siNA sense region
aguaguguugggucgcgaa

SEQ ID NO: 167 - RNA, 19 nt, Artificial Sequence
  Description of Artificial Sequence: Target Sequence/siNA sense region
uugggucgcgaaaggccuu

SEQ ID NO: 168 - RNA, 19 nt, Artificial Sequence
  Description of Artificial Sequence: Target Sequence/siNA sense region
uccccugugaggaacuacu

SEQ ID NO: 169 - RNA, 19 nt, Artificial Sequence
  Description of Artificial Sequence: Target Sequence/siNA sense region
uacugucuucacgcagaaa

SEQ ID NO: 170 - RNA, 19 nt, Artificial Sequence
  Description of Artificial Sequence: Target Sequence/siNA sense region
guguugggucgcgaaaggc

SEQ ID NO: 171 - RNA, 19 nt, Artificial Sequence
  Description of Artificial Sequence: Target Sequence/siNA sense region
acuacugucuucacgcaga

SEQ ID NO: 172 - RNA, 19 nt, Artificial Sequence
  Description of Artificial Sequence: Target Sequence/siNA sense region
cugucuucacgcagaaagc

SEQ ID NO: 173 - RNA, 19 nt, Artificial Sequence
  Description of Artificial Sequence: Target Sequence/siNA sense region
gggucgcgaaaggccuugu

SEQ ID NO: 174 - RNA, 19 nt, Artificial Sequence
  Description of Artificial Sequence: Target Sequence/siNA sense region
ccuaaaccucaaagaaaaa

SEQ ID NO: 175 - RNA, 19 nt, Artificial Sequence
  Description of Artificial Sequence: Target Sequence/siNA sense region
ggucgcgaaaggccuugug

SEQ ID NO: 176 - RNA, 19 nt, Artificial Sequence
  Description of Artificial Sequence: Target Sequence/siNA sense region
cuaaaccucaaagaaaaac

SEQ ID NO: 177 - RNA, 19 nt, Artificial Sequence
  Description of Artificial Sequence: Target Sequence/siNA sense region
uguugggucgcgaaaggcc

SEQ ID NO: 178 - RNA, 19 nt, Artificial Sequence
  Description of Artificial Sequence: Target Sequence/siNA sense region
cuccccugugaggaacuac

SEQ ID NO: 179 - RNA, 19 nt, Artificial Sequence
  Description of Artificial Sequence: Target Sequence/siNA sense region
uccuaaaccucaaagaaaa

SEQ ID NO: 180 - RNA, 19 nt, Artificial Sequence
  Description of Artificial Sequence: Target Sequence/siNA sense region
accggguccuuucuuggau

SEQ ID NO: 181 - RNA, 19 nt, Artificial Sequence
  Description of Artificial Sequence: Target Sequence/siNA sense region
aauccuaaaccucaaagaa

SEQ ID NO: 182 - RNA, 19 nt, Artificial Sequence
  Description of Artificial Sequence: Target Sequence/siNA sense region
ucaaugccuggagauuugg

SEQ ID NO: 183 - RNA, 19 nt, Artificial Sequence
  Description of Artificial Sequence: Target Sequence/siNA sense region
augccuggagauuugggcg

SEQ ID NO: 184 - RNA, 19 nt, Artificial Sequence
  Description of Artificial Sequence: Target Sequence/siNA sense region
aaugccuggagauuugggc

SEQ ID NO: 185 - RNA, 19 nt, Artificial Sequence
  Description of Artificial Sequence: Target Sequence/siNA sense region
ccgaccucaugggguacau

SEQ ID NO: 186 - RNA, 19 nt, Artificial Sequence
  Description of Artificial Sequence: Target Sequence/siNA sense region
gcucaaugccuggagauuu

SEQ ID NO: 187 - RNA, 19 nt, Artificial Sequence
  Description of Artificial Sequence: Target Sequence/siNA sense region
cucaaugccuggagauuug

SEQ ID NO: 188 - RNA, 19 nt, Artificial Sequence
  Description of Artificial Sequence: Target Sequence/siNA sense region
gcuagccgaguaguguugg

SEQ ID NO: 189 - RNA, 19 nt, Artificial Sequence
  Description of Artificial Sequence: Target Sequence/siNA sense region
cgcucaaugccuggagauu

SEQ ID NO: 190 - RNA, 19 nt, Artificial Sequence
  Description of Artificial Sequence: Target Sequence/siNA sense region
caaugccuggagauuuggg

SEQ ID NO: 191 - RNA, 19 nt, Artificial Sequence
  Description of Artificial Sequence: Target Sequence/siNA sense region
gccgaccucaugggguaca

SEQ ID NO: 192 - RNA, 19 nt, Artificial Sequence
  Description of Artificial Sequence: Target Sequence/siNA sense region
auccuaaaccucaaagaaa

SEQ ID NO: 193 - RNA, 19 nt, Artificial Sequence
  Description of Artificial Sequence: Target Sequence/siNA sense region
agauuugggcgugcccccg

SEQ ID NO: 194 - RNA, 19 nt, Artificial Sequence
  Description of Artificial Sequence: Target Sequence/siNA sense region
cccgcucaaugccuggaga

SEQ ID NO: 195 - RNA, 19 nt, Artificial Sequence
  Description of Artificial Sequence: Target Sequence/siNA sense region
gagauuugggcgugccccc

SEQ ID NO: 196 - RNA, 19 nt, Artificial Sequence
  Description of Artificial Sequence: Target Sequence/siNA sense region
ggagauuugggcgugcccc

SEQ ID NO: 197 - RNA, 19 nt, Artificial Sequence
  Description of Artificial Sequence: Target Sequence/siNA sense region
gauuugggcgugcccccgc

SEQ ID NO: 198 - RNA, 19 nt, Artificial Sequence
  Description of Artificial Sequence: Target Sequence/siNA sense region
ccgcucaaugccuggagau

SEQ ID NO: 199 - RNA, 19 nt, Artificial Sequence
  Description of Artificial Sequence: Target Sequence/siNA sense region
aguacaccggaauugccag

SEQ ID NO: 200 - RNA, 19 nt, Artificial Sequence
  Description of Artificial Sequence: Target Sequence/siNA sense region
uacaccggaauugccagga

SEQ ID NO: 201 - RNA, 19 nt, Artificial Sequence
  Description of Artificial Sequence: Target Sequence/siNA sense region
gaguacaccggaauugcca

SEQ ID NO: 202 - RNA, 19 nt, Artificial Sequence
  Description of Artificial Sequence: Target Sequence/siNA sense region
guacaccggaauugccagg

SEQ ID NO: 203 - RNA, 19 nt, Artificial Sequence
  Description of Artificial Sequence: Target Sequence/siNA sense region
uugccgcgcaggggcccca

SEQ ID NO: 204 - RNA, 19 nt, Artificial Sequence
  Description of Artificial Sequence: Target Sequence/siNA sense region
cuggagauuugggcgugcc

SEQ ID NO: 205 - RNA, 19 nt, Artificial Sequence
  Description of Artificial Sequence: Target Sequence/siNA sense region
guugccgcgcaggggcccc

SEQ ID NO: 206 - RNA, 19 nt, Artificial Sequence
  Description of Artificial Sequence: Target Sequence/siNA sense region
gccuggagauuugggcgug

SEQ ID NO: 207 - RNA, 19 nt, Artificial Sequence
  Description of Artificial Sequence: Target Sequence/siNA sense region
uggagauuugggcgugccc

SEQ ID NO: 208 - RNA, 19 nt, Artificial Sequence
  Description of Artificial Sequence: Target Sequence/siNA sense region
ccuggagauuugggcgugc

SEQ ID NO: 209 - RNA, 19 nt, Artificial Sequence
  Description of Artificial Sequence: Target Sequence/siNA sense region
ugcuagccgaguaguguug

SEQ ID NO: 210 - RNA, 19 nt, Artificial Sequence
  Description of Artificial Sequence: Target Sequence/siNA sense region
ugccuggagauuugggcgu

SEQ ID NO: 211 - RNA, 19 nt, Artificial Sequence
  Description of Artificial Sequence: Target Sequence/siNA sense region
cugcuagccgaguaguguu

SEQ ID NO: 212 - RNA, 19 nt, Artificial Sequence
  Description of Artificial Sequence: Target Sequence/siNA sense region
acugcuagccgaguagugu

SEQ ID NO: 213 - RNA, 19 nt, Artificial Sequence
  Description of Artificial Sequence: Target Sequence/siNA sense region
gacugcuagccgaguagug

SEQ ID NO: 214 - RNA, 19 nt, Artificial Sequence
  Description of Artificial Sequence: Target Sequence/siNA sense region
agacugcuagccgaguagu

SEQ ID NO: 215 - RNA, 19 nt, Artificial Sequence
  Description of Artificial Sequence: Target Sequence/siNA sense region
acccgcucaaugccuggag

SEQ ID NO: 216 - RNA, 19 nt, Artificial Sequence
  Description of Artificial Sequence: Target Sequence/siNA sense region
aacccgcucaaugccugga

SEQ ID NO: 217 - RNA, 19 nt, Artificial Sequence
  Description of Artificial Sequence: Target Sequence/siNA sense region
ugccgcgcaggggccccag

SEQ ID NO: 218 - RNA, 19 nt, Artificial Sequence
  Description of Artificial Sequence: Target Sequence/siNA sense region
aggggccccagguugggug

SEQ ID NO: 219 - RNA, 19 nt, Artificial Sequence
  Description of Artificial Sequence: Target Sequence/siNA sense region
gggccccagguugggugug

SEQ ID NO: 220 - RNA, 19 nt, Artificial Sequence
  Description of Artificial Sequence: Target Sequence/siNA sense region
caggggccccagguugggu

SEQ ID NO: 221 - RNA, 19 nt, Artificial Sequence
  Description of Artificial Sequence: Target Sequence/siNA sense region
ggccccagguugggugugc

SEQ ID NO: 222 - RNA, 19 nt, Artificial Sequence
  Description of Artificial Sequence: Target Sequence/siNA sense region
cgcaggggccccagguugg

SEQ ID NO: 223 - RNA, 19 nt, Artificial Sequence
  Description of Artificial Sequence: Target Sequence/siNA sense region
ugggcaggauggcuccugu

SEQ ID NO: 224 - RNA, 19 nt, Artificial Sequence
  Description of Artificial Sequence: Target Sequence/siNA sense region
gccccagguugggugugcg

SEQ ID NO: 225 - RNA, 19 nt, Artificial Sequence
  Description of Artificial Sequence: Target Sequence/siNA sense region
gcaggggccccagguuggg

SEQ ID NO: 226 - RNA, 19 nt, Artificial Sequence
  Description of Artificial Sequence: Target Sequence/siNA sense region
gggcaggauggcuccuguc

SEQ ID NO: 227 - RNA, 19 nt, Artificial Sequence
  Description of Artificial Sequence: Target Sequence/siNA sense region
ggggccccagguugggugu

SEQ ID NO: 228 - RNA, 19 nt, Artificial Sequence
  Description of Artificial Sequence: Target Sequence/siNA sense region
gccgcgcaggggccccagg

SEQ ID NO: 229 - RNA, 19 nt, Artificial Sequence
  Description of Artificial Sequence: Target Sequence/siNA sense region
gcgcaggggccccagguug

SEQ ID NO: 230 - RNA, 19 nt, Artificial Sequence
  Description of Artificial Sequence: Target Sequence/siNA sense region
cgcgcaggggccccagguu

SEQ ID NO: 231 - RNA, 19 nt, Artificial Sequence
  Description of Artificial Sequence: Target Sequence/siNA sense region
ccgcgcaggggccccaggu

SEQ ID NO: 232 - RNA, 19 nt, Artificial Sequence
  Description of Artificial Sequence: Target Sequence/siNA sense region
aggacgaccggguccuuuc

SEQ ID NO: 233 - RNA, 19 nt, Artificial Sequence
  Description of Artificial Sequence: Target Sequence/siNA sense region
caggacgaccggguccuuu

SEQ ID NO: 234 - RNA, 19 nt, Artificial Sequence
  Description of Artificial Sequence: Target Sequence/siNA sense region
ugccaggacgaccgggucc

SEQ ID NO: 235 - RNA, 19 nt, Artificial Sequence
  Description of Artificial Sequence: Target Sequence/siNA sense region
auugccaggacgaccgggu

SEQ ID NO: 236 - RNA, 19 nt, Artificial Sequence
  Description of Artificial Sequence: Target Sequence/siNA sense region
aauugccaggacgaccggg

SEQ ID NO: 237 - RNA, 19 nt, Artificial Sequence
  Description of Artificial Sequence: Target Sequence/siNA sense region
uugccaggacgaccggguc

SEQ ID NO: 238 - RNA, 19 nt, Artificial Sequence
  Description of Artificial Sequence: Target Sequence/siNA sense region
ccaggacgaccggguccuu

SEQ ID NO: 239 - RNA, 19 nt, Artificial Sequence
  Description of Artificial Sequence: Target Sequence/siNA sense region
gccaggacgaccggguccu

SEQ ID NO: 240 - RNA, 19 nt, Artificial Sequence
  Description of Artificial Sequence: Target Sequence/siNA sense region
gaauugccaggacgaccgg

SEQ ID NO: 241 - RNA, 19 nt, Artificial Sequence
  Description of Artificial Sequence: Target Sequence/siNA sense region
acgaccggguccuuucuug

SEQ ID NO: 242 - RNA, 19 nt, Artificial Sequence
  Description of Artificial Sequence: Target Sequence/siNA sense region
gacgaccggguccuuucuu

SEQ ID NO: 243 - RNA, 19 nt, Artificial Sequence
  Description of Artificial Sequence: Target Sequence/siNA sense region
cgaccggguccuuucuugg

SEQ ID NO: 244 - RNA, 19 nt, Artificial Sequence
  Description of Artificial Sequence: Target Sequence/siNA sense region
ggacgaccggguccuuucu

SEQ ID NO: 245 - RNA, 19 nt, Artificial Sequence
  Description of Artificial Sequence: Target Sequence/siNA sense region
ccggaauugccaggacgac

SEQ ID NO: 246 - RNA, 19 nt, Artificial Sequence
  Description of Artificial Sequence: Target Sequence/siNA sense region
acaccggaauugccaggac

SEQ ID NO: 247 - RNA, 19 nt, Artificial Sequence
  Description of Artificial Sequence: Target Sequence/siNA sense region
accggaauugccaggacga

SEQ ID NO: 248 - RNA, 19 nt, Artificial Sequence
  Description of Artificial Sequence: Target Sequence/siNA sense region
cggaauugccaggacgacc

SEQ ID NO: 249 - RNA, 19 nt, Artificial Sequence
  Description of Artificial Sequence: Target Sequence/siNA sense region
ggaauugccaggacgaccg

SEQ ID NO: 250 - RNA, 19 nt, Artificial Sequence
  Description of Artificial Sequence: Target Sequence/siNA sense region
caccggaauugccaggacg

SEQ ID NO: 251 - RNA, 19 nt, Artificial Sequence
  Description of Artificial Sequence: Target Sequence/siNA sense region
ccccagguugggugugcgc

SEQ ID NO: 252 - RNA, 19 nt, Artificial Sequence
  Description of Artificial Sequence: Target Sequence/siNA sense region
gaucguugguggaguuuac

SEQ ID NO: 253 - RNA, 19 nt, Artificial Sequence
  Description of Artificial Sequence: Target Sequence/siNA sense region
cagaucguugguggaguuu

SEQ ID NO: 254 - RNA, 19 nt, Artificial Sequence
  Description of Artificial Sequence: Target Sequence/siNA sense region
agaucguugguggaguuua

SEQ ID NO: 255 - RNA, 19 nt, Artificial Sequence
  Description of Artificial Sequence: Target Sequence/siNA sense region
cccagguugggugugcgcg

SEQ ID NO: 256 - RNA, 19 nt, Artificial Sequence
  Description of Artificial Sequence: Target Sequence/siNA sense region
ccagguugggugugcgcgc

SEQ ID NO: 257 - RNA, 19 nt, Artificial Sequence
  Description of Artificial Sequence: Target Sequence/siNA sense region
agguugggugugcgcgcga

SEQ ID NO: 258 - RNA, 19 nt, Artificial Sequence
  Description of Artificial Sequence: Target Sequence/siNA sense region
cagguugggugugcgcgcg

SEQ ID NO: 259 - RNA, 19 nt, Artificial Sequence
  Description of Artificial Sequence: Target Sequence/siNA sense region
gguugggugugcgcgcgac

SEQ ID NO: 260 - RNA, 19 nt, Artificial Sequence
  Description of Artificial Sequence: Target Sequence/siNA sense region
gaaaaaccaaacguaacac

SEQ ID NO: 261 - RNA, 19 nt, Artificial Sequence
  Description of Artificial Sequence: Target Sequence/siNA sense region
agaaaaaccaaacguaaca

SEQ ID NO: 262 - RNA, 19 nt, Artificial Sequence
  Description of Artificial Sequence: Target Sequence/siNA sense region
aaccaaacguaacaccaac

SEQ ID NO: 263 - RNA, 19 nt, Artificial Sequence
  Description of Artificial Sequence: Target Sequence/siNA sense region
aaagaaaaaccaaacguaa

SEQ ID NO: 264 - RNA, 19 nt, Artificial Sequence
  Description of Artificial Sequence: Target Sequence/siNA sense region
aaaaaccaaacguaacacc

SEQ ID NO: 265 - RNA, 19 nt, Artificial Sequence
  Description of Artificial Sequence: Target Sequence/siNA sense region
aagaaaaaccaaacguaac

SEQ ID NO: 266 - RNA, 19 nt, Artificial Sequence
  Description of Artificial Sequence: Target Sequence/siNA sense region
caaagaaaaaccaaacgua

SEQ ID NO: 267 - RNA, 19 nt, Artificial Sequence
  Description of Artificial Sequence: Target Sequence/siNA sense region
acccccggcguaggucgcg

SEQ ID NO: 268 - RNA, 19 nt, Artificial Sequence
  Description of Artificial Sequence: Target Sequence/siNA sense region
gacccccggcguaggucgc

SEQ ID NO: 269 - RNA, 19 nt, Artificial Sequence
  Description of Artificial Sequence: Target Sequence/siNA sense region
cguuaguaugagugucgug

SEQ ID NO: 270 - RNA, 19 nt, Artificial Sequence
  Description of Artificial Sequence: Target Sequence/siNA sense region
guuaguaugagugucgugc

SEQ ID NO: 271 - RNA, 19 nt, Artificial Sequence
  Description of Artificial Sequence: Target Sequence/siNA sense region
uuaguaugagugucgugca

SEQ ID NO: 272 - RNA, 19 nt, Artificial Sequence
  Description of Artificial Sequence: Target Sequence/siNA sense region
ccaaacguaacaccaaccg

SEQ ID NO: 273 - RNA, 19 nt, Artificial Sequence
  Description of Artificial Sequence: Target Sequence/siNA sense region
accaaacguaacaccaacc

SEQ ID NO: 274 - RNA, 19 nt, Artificial Sequence
  Description of Artificial Sequence: Target Sequence/siNA sense region
uugggcgugcccccgcgag

SEQ ID NO: 275 - RNA, 19 nt, Artificial Sequence
  Description of Artificial Sequence: Target Sequence/siNA sense region
auuugggcgugcccccgcg

SEQ ID NO: 276 - RNA, 19 nt, Artificial Sequence
  Description of Artificial Sequence: Target Sequence/siNA sense region
uuugggcgugcccccgcga

SEQ ID NO: 277 - RNA, 19 nt, Artificial Sequence
  Description of Artificial Sequence: Target Sequence/siNA sense region
aaaccaaacguaacaccaa

SEQ ID NO: 278 - RNA, 19 nt, Artificial Sequence
  Description of Artificial Sequence: Target Sequence/siNA sense region
ugggcgugcccccgcgaga

SEQ ID NO: 279 - RNA, 19 nt, Artificial Sequence
  Description of Artificial Sequence: Target Sequence/siNA sense region
gucagaucguugguggagu

SEQ ID NO: 280 - RNA, 19 nt, Artificial Sequence
  Description of Artificial Sequence: Target Sequence/siNA sense region
gugucgugcagccuccagg

SEQ ID NO: 281 - RNA, 19 nt, Artificial Sequence
  Description of Artificial Sequence: Target Sequence/siNA sense region
ggucagaucguugguggag

SEQ ID NO: 282 - RNA, 19 nt, Artificial Sequence
  Description of Artificial Sequence: Target Sequence/siNA sense region
agugucgugcagccuccag

SEQ ID NO: 283 - RNA, 19 nt, Artificial Sequence
  Description of Artificial Sequence: Target Sequence/siNA sense region
gagugucgugcagccucca

SEQ ID NO: 284 - RNA, 19 nt, Artificial Sequence
  Description of Artificial Sequence: Target Sequence/siNA sense region
ucguagaccgugcaccaug

SEQ ID NO: 285 - RNA, 19 nt, Artificial Sequence
  Description of Artificial Sequence: Target Sequence/siNA sense region
gaccgugcaccaugagcac

SEQ ID NO: 286 - RNA, 19 nt, Artificial Sequence
  Description of Artificial Sequence: Target Sequence/siNA sense region
aguaugagugucgugcagc

SEQ ID NO: 287 - RNA, 19 nt, Artificial Sequence
  Description of Artificial Sequence: Target Sequence/siNA sense region
uaguaugagugucgugcag

SEQ ID NO: 288 - RNA, 19 nt, Artificial Sequence
  Description of Artificial Sequence: Target Sequence/siNA sense region
ucagaucguugguggaguu

SEQ ID NO: 289 - RNA, 19 nt, Artificial Sequence
  Description of Artificial Sequence: Target Sequence/siNA sense region
agaccgugcaccaugagca

SEQ ID NO: 290 - RNA, 19 nt, Artificial Sequence
  Description of Artificial Sequence: Target Sequence/siNA sense region
aaaaccaaacguaacacca

SEQ ID NO: 291 - RNA, 19 nt, Artificial Sequence
  Description of Artificial Sequence: Target Sequence/siNA sense region
guagaccgugcaccaugag

SEQ ID NO: 292 - RNA, 19 nt, Artificial Sequence
  Description of Artificial Sequence: Target Sequence/siNA sense region
cucguagaccgugcaccau

SEQ ID NO: 293 - RNA, 19 nt, Artificial Sequence
  Description of Artificial Sequence: Target Sequence/siNA sense region
cguagaccgugcaccauga

SEQ ID NO: 294 - RNA, 19 nt, Artificial Sequence
  Description of Artificial Sequence: Target Sequence/siNA sense region
ccugggcucagcccgggua

SEQ ID NO: 295 - RNA, 19 nt, Artificial Sequence
  Description of Artificial Sequence: Target Sequence/siNA sense region
uagaccgugcaccaugagc

SEQ ID NO: 296 - RNA, 19 nt, Artificial Sequence
  Description of Artificial Sequence: Target Sequence/siNA sense region
ggucucguagaccgugcac

SEQ ID NO: 297 - RNA, 19 nt, Artificial Sequence
  Description of Artificial Sequence: Target Sequence/siNA sense region
ucucguagaccgugcacca

SEQ ID NO: 298 - RNA, 19 nt, Artificial Sequence
  Description of Artificial Sequence: Target Sequence/siNA sense region
gucucguagaccgugcacc

SEQ ID NO: 299 - RNA, 19 nt, Artificial Sequence
  Description of Artificial Sequence: Target Sequence/siNA sense region
uuggguaaggucaucgaua

SEQ ID NO: 300 - RNA, 19 nt, Artificial Sequence
  Description of Artificial Sequence: Target Sequence/siNA sense region
ucgccgaccucauggggua

SEQ ID NO: 301 - RNA, 19 nt, Artificial Sequence
  Description of Artificial Sequence: Target Sequence/siNA sense region
ccucaaagaaaaaccaaac

SEQ ID NO: 302 - RNA, 19 nt, Artificial Sequence
  Description of Artificial Sequence: Target Sequence/siNA sense region
gggcgugcccccgcgagac

SEQ ID NO: 303 - RNA, 19 nt, Artificial Sequence
  Description of Artificial Sequence: Target Sequence/siNA sense region
ggaugaaccggcugauagc

SEQ ID NO: 304 - RNA, 19 nt, Artificial Sequence
  Description of Artificial Sequence: Target Sequence/siNA sense region
uggaugaaccggcugauag

SEQ ID NO: 305 - RNA, 19 nt, Artificial Sequence
  Description of Artificial Sequence: Target Sequence/siNA sense region
cucaaagaaaaaccaaacg

SEQ ID NO: 306 - RNA, 19 nt, Artificial Sequence
  Description of Artificial Sequence: Target Sequence/siNA sense region
aggaagacuuccgagcggu

SEQ ID NO: 307 - RNA, 19 nt, Artificial Sequence
  Description of Artificial Sequence: Target Sequence/siNA sense region
ucaaagaaaaaccaaacgu

SEQ ID NO: 308 - RNA, 19 nt, Artificial Sequence
  Description of Artificial Sequence: Target Sequence/siNA sense region
ggaagacuuccgagcgguc

SEQ ID NO: 309 - RNA, 19 nt, Artificial Sequence
  Description of Artificial Sequence: Target Sequence/siNA sense region
cgccgaccucaugggguac

SEQ ID NO: 310 - RNA, 19 nt, Artificial Sequence
  Description of Artificial Sequence: Target Sequence/siNA sense region
cuuccgagcggucgcaacc

SEQ ID NO: 311 - RNA, 19 nt, Artificial Sequence
  Description of Artificial Sequence: Target Sequence/siNA sense region
ggcgugcccccgcgagacu

SEQ ID NO: 312 - RNA, 19 nt, Artificial Sequence
  Description of Artificial Sequence: Target Sequence/siNA sense region
uaugagugucgugcagccu

SEQ ID NO: 313 - RNA, 19 nt, Artificial Sequence
  Description of Artificial Sequence: Target Sequence/siNA sense region
ugcccccgcgagacugcua

SEQ ID NO: 314 - RNA, 19 nt, Artificial Sequence
  Description of Artificial Sequence: Target Sequence/siNA sense region
cgagacugcuagccgagua

SEQ ID NO: 315 - RNA, 19 nt, Artificial Sequence
  Description of Artificial Sequence: Target Sequence/siNA sense region
ugagugucgugcagccucc

SEQ ID NO: 316 - RNA, 19 nt, Artificial Sequence
  Description of Artificial Sequence: Target Sequence/siNA sense region
gcccccgcgagacugcuag

SEQ ID NO: 317 - RNA, 19 nt, Artificial Sequence
  Description of Artificial Sequence: Target Sequence/siNA sense region
gagacugcuagccgaguag

SEQ ID NO: 318 - RNA, 19 nt, Artificial Sequence
  Description of Artificial Sequence: Target Sequence/siNA sense region
cccccgcgagacugcuagc

SEQ ID NO: 319 - RNA, 19 nt, Artificial Sequence
  Description of Artificial Sequence: Target Sequence/siNA sense region
cgcgagacugcuagccgag

SEQ ID NO: 320 - RNA, 19 nt, Artificial Sequence
  Description of Artificial Sequence: Target Sequence/siNA sense region
guaugagugucgugcagcc

SEQ ID NO: 321 - RNA, 19 nt, Artificial Sequence
  Description of Artificial Sequence: Target Sequence/siNA sense region
augagugucgugcagccuc

SEQ ID NO: 322 - RNA, 19 nt, Artificial Sequence
  Description of Artificial Sequence: Target Sequence/siNA sense region
gcgagacugcuagccgagu

SEQ ID NO: 323 - RNA, 19 nt, Artificial Sequence
  Description of Artificial Sequence: Target Sequence/siNA sense region
ccccgcgagacugcuagcc

SEQ ID NO: 324 - RNA, 19 nt, Artificial Sequence
  Description of Artificial Sequence: Target Sequence/siNA sense region
ccgcgagacugcuagccga

SEQ ID NO: 325 - RNA, 19 nt, Artificial Sequence
  Description of Artificial Sequence: Target Sequence/siNA sense region
cccgcgagacugcuagccg

SEQ ID NO: 326 - RNA, 19 nt, Artificial Sequence
  Description of Artificial Sequence: Target Sequence/siNA sense region
gcgugcccccgcgagacug

SEQ ID NO: 327 - RNA, 19 nt, Artificial Sequence
  Description of Artificial Sequence: Target Sequence/siNA sense region
gacccccccucccgggaga

SEQ ID NO: 328 - RNA, 19 nt, Artificial Sequence
  Description of Artificial Sequence: Target Sequence/siNA sense region
cggguccuuucuuggauca

SEQ ID NO: 329 - RNA, 19 nt, Artificial Sequence
  Description of Artificial Sequence: Target Sequence/siNA sense region
gugcccccgcgagacugcu

SEQ ID NO: 330 - RNA, 19 nt, Artificial Sequence
  Description of Artificial Sequence: Target Sequence/siNA sense region
cgugcccccgcgagacugc

SEQ ID NO: 331 - RNA, 19 nt, Artificial Sequence
  Description of Artificial Sequence: Target Sequence/siNA sense region
uucgccgaccucauggggu

SEQ ID NO: 332 - RNA, 19 nt, Artificial Sequence
  Description of Artificial Sequence: Target Sequence/siNA sense region
cgcccacaggacgucaagu

SEQ ID NO: 333 - RNA, 19 nt, Artificial Sequence
  Description of Artificial Sequence: Target Sequence/siNA sense region
gcccacaggacgucaaguu

SEQ ID NO: 334 - RNA, 19 nt, Artificial Sequence
  Description of Artificial Sequence: Target Sequence/siNA sense region
acccccccucccgggagag

SEQ ID NO: 335 - RNA, 19 nt, Artificial Sequence
  Description of Artificial Sequence: Target Sequence/siNA sense region
ggacccccccucccgggag

SEQ ID NO: 336 - RNA, 19 nt, Artificial Sequence
  Description of Artificial Sequence: Target Sequence/siNA sense region
ccggguccuuucuuggauc

SEQ ID NO: 337 - RNA, 19 nt, Artificial Sequence
  Description of Artificial Sequence: Target Sequence/siNA sense region
caggacccccccucccggg

SEQ ID NO: 338 - RNA, 19 nt, Artificial Sequence
  Description of Artificial Sequence: Target Sequence/siNA sense region
aggacgucaaguucccggg

SEQ ID NO: 339 - RNA, 19 nt, Artificial Sequence
  Description of Artificial Sequence: Target Sequence/siNA sense region
aggacccccccucccggga

SEQ ID NO: 340 - RNA, 19 nt, Artificial Sequence
  Description of Artificial Sequence: Target Sequence/siNA sense region
ccacaggacgucaaguucc

SEQ ID NO: 341 - RNA, 19 nt, Artificial Sequence
  Description of Artificial Sequence: Target Sequence/siNA sense region
caggacgucaaguucccgg

SEQ ID NO: 342 - RNA, 19 nt, Artificial Sequence
  Description of Artificial Sequence: Target Sequence/siNA sense region
acaggacgucaaguucccg

SEQ ID NO: 343 - RNA, 19 nt, Artificial Sequence
  Description of Artificial Sequence: Target Sequence/siNA sense region
cacaggacgucaaguuccc

SEQ ID NO: 344 - RNA, 19 nt, Artificial Sequence
  Description of Artificial Sequence: Target Sequence/siNA sense region
caguggaugaaccggcuga

SEQ ID NO: 345 - RNA, 19 nt, Artificial Sequence
  Description of Artificial Sequence: Target Sequence/siNA sense region
gggcucagcccggguaccc

SEQ ID NO: 346 - RNA, 19 nt, Artificial Sequence
  Description of Artificial Sequence: Target Sequence/siNA sense region
ccgagcggucgcaaccucg

SEQ ID NO: 347 - RNA, 19 nt, Artificial Sequence
  Description of Artificial Sequence: Target Sequence/siNA sense region
cugggcucagcccggguac

SEQ ID NO: 348 - RNA, 19 nt, Artificial Sequence
  Description of Artificial Sequence: Target Sequence/siNA sense region
aguggaugaaccggcugau

SEQ ID NO: 349 - RNA, 19 nt, Artificial Sequence
  Description of Artificial Sequence: Target Sequence/siNA sense region
uccgagcggucgcaaccuc

SEQ ID NO: 350 - RNA, 19 nt, Artificial Sequence
  Description of Artificial Sequence: Target Sequence/siNA sense region
ugggcucagcccggguacc

SEQ ID NO: 351 - RNA, 19 nt, Artificial Sequence
  Description of Artificial Sequence: Target Sequence/siNA sense region
gguacccuuggccccucua

SEQ ID NO: 352 - RNA, 19 nt, Artificial Sequence
  Description of Artificial Sequence: Target Sequence/siNA sense region
uuccgagcggucgcaaccu

SEQ ID NO: 353 - RNA, 19 nt, Artificial Sequence
  Description of Artificial Sequence: Target Sequence/siNA sense region
ggguacccuuggccccucu

SEQ ID NO: 354 - RNA, 19 nt, Artificial Sequence
  Description of Artificial Sequence: Target Sequence/siNA sense region
ggguccuuucuuggaucaa

SEQ ID NO: 355 - RNA, 19 nt, Artificial Sequence
  Description of Artificial Sequence: Target Sequence/siNA sense region
cccacaggacgucaaguuc

SEQ ID NO: 356 - RNA, 19 nt, Artificial Sequence
  Description of Artificial Sequence: Target Sequence/siNA sense region
gguugcucuuucucuaucu

SEQ ID NO: 357 - RNA, 19 nt, Artificial Sequence
  Description of Artificial Sequence: Target Sequence/siNA sense region
gugggcaggauggcuccug

SEQ ID NO: 358 - RNA, 19 nt, Artificial Sequence
  Description of Artificial Sequence: Target Sequence/siNA sense region
ggugggcaggauggcuccu

SEQ ID NO: 359 - RNA, 19 nt, Artificial Sequence
  Description of Artificial Sequence: Target Sequence/siNA sense region
guugcucuuucucuaucuu

SEQ ID NO: 360 - RNA, 19 nt, Artificial Sequence
  Description of Artificial Sequence: Target Sequence/siNA sense region
guggaugaaccggcugaua

SEQ ID NO: 361 - RNA, 19 nt, Artificial Sequence
  Description of Artificial Sequence: Target Sequence/siNA sense region
ccaggacccccccucccgg

SEQ ID NO: 362 - RNA, 19 nt, Artificial Sequence
  Description of Artificial Sequence: Target Sequence/siNA sense region
gggugggcaggauggcucc

SEQ ID NO: 363 - RNA, 19 nt, Artificial Sequence
  Description of Artificial Sequence: Target Sequence/siNA sense region
cuucacggaggcuaugacu

SEQ ID NO: 364 - RNA, 19 nt, Artificial Sequence
  Description of Artificial Sequence: Target Sequence/siNA sense region
accgccgcccacaggacgu

SEQ ID NO: 365 - RNA, 19 nt, Artificial Sequence
  Description of Artificial Sequence: Target Sequence/siNA sense region
uccaggacccccccucccg

SEQ ID NO: 366 - RNA, 19 nt, Artificial Sequence
  Description of Artificial Sequence: Target Sequence/siNA sense region
auaugaugaugaacugguc

SEQ ID NO: 367 - RNA, 19 nt, Artificial Sequence
  Description of Artificial Sequence: Target Sequence/siNA sense region
uucacggaggcuaugacua

SEQ ID NO: 368 - RNA, 19 nt, Artificial Sequence
  Description of Artificial Sequence: Target Sequence/siNA sense region
ucacggaggcuaugacuag

SEQ ID NO: 369 - RNA, 19 nt, Artificial Sequence
  Description of Artificial Sequence: Target Sequence/siNA sense region
augaaccggcugauagcgu

SEQ ID NO: 370 - RNA, 19 nt, Artificial Sequence
  Description of Artificial Sequence: Target Sequence/siNA sense region
gggauaugaugaugaacug

SEQ ID NO: 371 - RNA, 19 nt, Artificial Sequence
  Description of Artificial Sequence: Target Sequence/siNA sense region
ugcaguggaugaaccggcu

SEQ ID NO: 372 - RNA, 19 nt, Artificial Sequence
  Description of Artificial Sequence: Target Sequence/siNA sense region
gugcaguggaugaaccggc

SEQ ID NO: 373 - RNA, 19 nt, Artificial Sequence
  Description of Artificial Sequence: Target Sequence/siNA sense region
ugaaccggcugauagcguu

SEQ ID NO: 374 - RNA, 19 nt, Artificial Sequence
  Description of Artificial Sequence: Target Sequence/siNA sense region
ggauaugaugaugaacugg

SEQ ID NO: 375 - RNA, 19 nt, Artificial Sequence
  Description of Artificial Sequence: Target Sequence/siNA sense region
gcucuuucucuaucuuccu

SEQ ID NO: 376 - RNA, 19 nt, Artificial Sequence
  Description of Artificial Sequence: Target Sequence/siNA sense region
gggggcgacacuccaccau

SEQ ID NO: 377 - RNA, 19 nt, Artificial Sequence
  Description of Artificial Sequence: Target Sequence/siNA sense region
gaugaaccggcugauagcg

SEQ ID NO: 378 - RNA, 19 nt, Artificial Sequence
  Description of Artificial Sequence: Target Sequence/siNA sense region
gauaugaugaugaacuggu

SEQ ID NO: 379 - RNA, 19 nt, Artificial Sequence
  Description of Artificial Sequence: Target Sequence/siNA sense region
ugggauaugaugaugaacu

SEQ ID NO: 380 - RNA, 19 nt, Artificial Sequence
  Description of Artificial Sequence: Target Sequence/siNA sense region
uugcucuuucucuaucuuc

SEQ ID NO: 381 - RNA, 19 nt, Artificial Sequence
  Description of Artificial Sequence: Target Sequence/siNA sense region
ugggggcgacacuccacca

SEQ ID NO: 382 - RNA, 19 nt, Artificial Sequence
  Description of Artificial Sequence: Target Sequence/siNA sense region
ugcucuuucucuaucuucc

SEQ ID NO: 383 - RNA, 19 nt, Artificial Sequence
  Description of Artificial Sequence: Target Sequence/siNA sense region
gguccuuucuuggaucaac

SEQ ID NO: 384 - RNA, 19 nt, Artificial Sequence
  Description of Artificial Sequence: Target Sequence/siNA sense region
aagacuuccgagcggucgc

SEQ ID NO: 385 - RNA, 19 nt, Artificial Sequence
  Description of Artificial Sequence: Target Sequence/siNA sense region
agcccggguacccuuggcc

SEQ ID NO: 386 - RNA, 19 nt, Artificial Sequence
  Description of Artificial Sequence: Target Sequence/siNA sense region
uuucuuggaucaacccgcu

SEQ ID NO: 387 - RNA, 19 nt, Artificial Sequence
  Description of Artificial Sequence: Target Sequence/siNA sense region
cagcccggguacccuuggc

SEQ ID NO: 388 - RNA, 19 nt, Artificial Sequence
  Description of Artificial Sequence: Target Sequence/siNA sense region
agacuuccgagcggucgca

SEQ ID NO: 389 - RNA, 19 nt, Artificial Sequence
  Description of Artificial Sequence: Target Sequence/siNA sense region
uucuuggaucaacccgcuc

SEQ ID NO: 390 - RNA, 19 nt, Artificial Sequence
  Description of Artificial Sequence: Target Sequence/siNA sense region
cccggguacccuuggcccc

SEQ ID NO: 391 - RNA, 19 nt, Artificial Sequence
  Description of Artificial Sequence: Target Sequence/siNA sense region
guccuuucuuggaucaacc

SEQ ID NO: 392 - RNA, 19 nt, Artificial Sequence
  Description of Artificial Sequence: Target Sequence/siNA sense region
cuuucuuggaucaacccgc

SEQ ID NO: 393 - RNA, 19 nt, Artificial Sequence
  Description of Artificial Sequence: Target Sequence/siNA sense region
ccuuucuuggaucaacccg

SEQ ID NO: 394 - RNA, 19 nt, Artificial Sequence
  Description of Artificial Sequence: Target Sequence/siNA sense region
uccuuucuuggaucaaccc

SEQ ID NO: 395 - RNA, 19 nt, Artificial Sequence
  Description of Artificial Sequence: Target Sequence/siNA sense region
aaguucccgggcggugguc

SEQ ID NO: 396 - RNA, 19 nt, Artificial Sequence
  Description of Artificial Sequence: Target Sequence/siNA sense region
gcaguggaugaaccggcug

SEQ ID NO: 397 - RNA, 19 nt, Artificial Sequence
  Description of Artificial Sequence: Target Sequence/siNA sense region
ccggguacccuuggccccu

SEQ ID NO: 398 - RNA, 19 nt, Artificial Sequence
  Description of Artificial Sequence: Target Sequence/siNA sense region
aguucccgggcggugguca

SEQ ID NO: 399 - RNA, 19 nt, Artificial Sequence
  Description of Artificial Sequence: Target Sequence/siNA sense region
cuuggaucaacccgcucaa

SEQ ID NO: 400 - RNA, 19 nt, Artificial Sequence
  Description of Artificial Sequence: Target Sequence/siNA sense region
ggaucaacccgcucaaugc

SEQ ID NO: 401 - RNA, 19 nt, Artificial Sequence
  Description of Artificial Sequence: Target Sequence/siNA sense region
acuuccgagcggucgcaac

SEQ ID NO: 402 - RNA, 19 nt, Artificial Sequence
  Description of Artificial Sequence: Target Sequence/siNA sense region
ucuuggaucaacccgcuca

SEQ ID NO: 403 - RNA, 19 nt, Artificial Sequence
  Description of Artificial Sequence: Target Sequence/siNA sense region
uuggaucaacccgcucaau

SEQ ID NO: 404 - RNA, 19 nt, Artificial Sequence
  Description of Artificial Sequence: Target Sequence/siNA sense region
aaccgccgcccacaggacg

SEQ ID NO: 405 - RNA, 19 nt, Artificial Sequence
  Description of Artificial Sequence: Target Sequence/siNA sense region
gcgugaacuaugcaacagg

SEQ ID NO: 406 - RNA, 19 nt, Artificial Sequence
  Description of Artificial Sequence: Target Sequence/siNA sense region
aucaacccgcucaaugccu

SEQ ID NO: 407 - RNA, 19 nt, Artificial Sequence
  Description of Artificial Sequence: Target Sequence/siNA sense region
gaucaacccgcucaaugcc

SEQ ID NO: 408 - RNA, 19 nt, Artificial Sequence
  Description of Artificial Sequence: Target Sequence/siNA sense region
caacccgcucaaugccugg

SEQ ID NO: 409 - RNA, 19 nt, Artificial Sequence
  Description of Artificial Sequence: Target Sequence/siNA sense region
gcuucgccgaccucauggg

SEQ ID NO: 410 - RNA, 19 nt, Artificial Sequence
  Description of Artificial Sequence: Target Sequence/siNA sense region
gacuuccgagcggucgcaa

SEQ ID NO: 411 - RNA, 19 nt, Artificial Sequence
  Description of Artificial Sequence: Target Sequence/siNA sense region
ucaacccgcucaaugccug

SEQ ID NO: 412 - RNA, 19 nt, Artificial Sequence
  Description of Artificial Sequence: Target Sequence/siNA sense region
ggcuucgccgaccucaugg

SEQ ID NO: 413 - RNA, 19 nt, Artificial Sequence
  Description of Artificial Sequence: Target Sequence/siNA sense region
uggaucaacccgcucaaug

SEQ ID NO: 414 - RNA, 19 nt, Artificial Sequence
  Description of Artificial Sequence: Target Sequence/siNA sense region
cgggcgguggucagaucgu

SEQ ID NO: 415 - RNA, 19 nt, Artificial Sequence
  Description of Artificial Sequence: Target Sequence/siNA sense region
cuuggccccucuauggcaa

SEQ ID NO: 416 - RNA, 19 nt, Artificial Sequence
  Description of Artificial Sequence: Target Sequence/siNA sense region
ccgggcgguggucagaucg

SEQ ID NO: 417 - RNA, 19 nt, Artificial Sequence
  Description of Artificial Sequence: Target Sequence/siNA sense region
uggggugggcaggauggcu

SEQ ID NO: 418 - RNA, 19 nt, Artificial Sequence
  Description of Artificial Sequence: Target Sequence/siNA sense region
ggaguuuaccuguugccgc

SEQ ID NO: 419 - RNA, 19 nt, Artificial Sequence
  Description of Artificial Sequence: Target Sequence/siNA sense region
ccuuggccccucuauggca

SEQ ID NO: 420 - RNA, 19 nt, Artificial Sequence
  Description of Artificial Sequence: Target Sequence/siNA sense region
guggaguuuaccuguugcc

SEQ ID NO: 421 - RNA, 19 nt, Artificial Sequence
  Description of Artificial Sequence: Target Sequence/siNA sense region
gguggaguuuaccuguugc

SEQ ID NO: 422 - RNA, 19 nt, Artificial Sequence
  Description of Artificial Sequence: Target Sequence/siNA sense region
uucccgggcgguggucaga

SEQ ID NO: 423 - RNA, 19 nt, Artificial Sequence
  Description of Artificial Sequence: Target Sequence/siNA sense region
ugaacuaugcaacagggaa

SEQ ID NO: 424 - RNA, 19 nt, Artificial Sequence
  Description of Artificial Sequence: Target Sequence/siNA sense region
aguuuaccuguugccgcgc

SEQ ID NO: 425 - RNA, 19 nt, Artificial Sequence
  Description of Artificial Sequence: Target Sequence/siNA sense region
gugaacuaugcaacaggga

SEQ ID NO: 426 - RNA, 19 nt, Artificial Sequence
  Description of Artificial Sequence: Target Sequence/siNA sense region
uuaccuguugccgcgcagg

SEQ ID NO: 427 - RNA, 19 nt, Artificial Sequence
  Description of Artificial Sequence: Target Sequence/siNA sense region
ucccgggcgguggucagau

SEQ ID NO: 428 - RNA, 19 nt, Artificial Sequence
  Description of Artificial Sequence: Target Sequence/siNA sense region
guucccgggcgguggucag

SEQ ID NO: 429 - RNA, 19 nt, Artificial Sequence
  Description of Artificial Sequence: Target Sequence/siNA sense region
gcccggguacccuuggccc

SEQ ID NO: 430 - RNA, 19 nt, Artificial Sequence
  Description of Artificial Sequence: Target Sequence/siNA sense region
aaggagaugaaggcgaagg

SEQ ID NO: 431 - RNA, 19 nt, Artificial Sequence
  Description of Artificial Sequence: Target Sequence/siNA sense region
aggagaugaaggcgaaggc

SEQ ID NO: 432 - RNA, 19 nt, Artificial Sequence
  Description of Artificial Sequence: Target Sequence/siNA sense region
guuuaccuguugccgcgca

SEQ ID NO: 433 - RNA, 19 nt, Artificial Sequence
  Description of Artificial Sequence: Target Sequence/siNA sense region
cuguugccgcgcaggggcc

SEQ ID NO: 434 - RNA, 19 nt, Artificial Sequence
  Description of Artificial Sequence: Target Sequence/siNA sense region
aacaccaaccgccgcccac

SEQ ID NO: 435 - RNA, 19 nt, Artificial Sequence
  Description of Artificial Sequence: Target Sequence/siNA sense region
gaguuuaccuguugccgcg

SEQ ID NO: 436 - RNA, 19 nt, Artificial Sequence
  Description of Artificial Sequence: Target Sequence/siNA sense region
uuuaccuguugccgcgcag

SEQ ID NO: 437 - RNA, 19 nt, Artificial Sequence
  Description of Artificial Sequence: Target Sequence/siNA sense region
ggggugggcaggauggcuc

SEQ ID NO: 438 - RNA, 19 nt, Artificial Sequence
  Description of Artificial Sequence: Target Sequence/siNA sense region
gaagacuuccgagcggucg

SEQ ID NO: 439 - RNA, 19 nt, Artificial Sequence
  Description of Artificial Sequence: Target Sequence/siNA sense region
accuguugccgcgcagggg

SEQ ID NO: 440 - RNA, 19 nt, Artificial Sequence
  Description of Artificial Sequence: Target Sequence/siNA sense region
uaccuguugccgcgcaggg

SEQ ID NO: 441 - RNA, 19 nt, Artificial Sequence
  Description of Artificial Sequence: Target Sequence/siNA sense region
uaccucuucaacugggcag

SEQ ID NO: 442 - RNA, 19 nt, Artificial Sequence
  Description of Artificial Sequence: Target Sequence/siNA sense region
cgugaacuaugcaacaggg

SEQ ID NO: 443 - RNA, 19 nt, Artificial Sequence
  Description of Artificial Sequence: Target Sequence/siNA sense region
acaccaaccgccgcccaca

SEQ ID NO: 444 - RNA, 19 nt, Artificial Sequence
  Description of Artificial Sequence: Target Sequence/siNA sense region
cccgggcgguggucagauc

SEQ ID NO: 445 - RNA, 19 nt, Artificial Sequence
  Description of Artificial Sequence: Target Sequence/siNA sense region
accucuucaacugggcagu

SEQ ID NO: 446 - RNA, 19 nt, Artificial Sequence
  Description of Artificial Sequence: Target Sequence/siNA sense region
cuucgccgaccucaugggg

SEQ ID NO: 447 - RNA, 19 nt, Artificial Sequence
  Description of Artificial Sequence: Target Sequence/siNA sense region
ccuguugccgcgcaggggc

SEQ ID NO: 448 - RNA, 19 nt, Artificial Sequence
  Description of Artificial Sequence: Target Sequence/siNA sense region
ccaaccgccgcccacagga

SEQ ID NO: 449 - RNA, 19 nt, Artificial Sequence
  Description of Artificial Sequence: Target Sequence/siNA sense region
accaaccgccgcccacagg

SEQ ID NO: 450 - RNA, 19 nt, Artificial Sequence
  Description of Artificial Sequence: Target Sequence/siNA sense region
uggaguuuaccuguugccg

SEQ ID NO: 451 - RNA, 19 nt, Artificial Sequence
  Description of Artificial Sequence: Target Sequence/siNA sense region
caccaaccgccgcccacag

SEQ ID NO: 452 - RNA, 19 nt, Artificial Sequence
  Description of Artificial Sequence: Target Sequence/siNA sense region
caaacguaacaccaaccgc

SEQ ID NO: 453 - RNA, 19 nt, Artificial Sequence
  Description of Artificial Sequence: Target Sequence/siNA sense region
caagcggagacggcuggag

SEQ ID NO: 454 - RNA, 19 nt, Artificial Sequence
  Description of Artificial Sequence: Target Sequence/siNA sense region
acggaggcuaugacuaggu

SEQ ID NO: 455 - RNA, 19 nt, Artificial Sequence
  Description of Artificial Sequence: Target Sequence/siNA sense region
uaacaccaaccgccgccca

SEQ ID NO: 456 - RNA, 19 nt, Artificial Sequence
  Description of Artificial Sequence: Target Sequence/siNA sense region
aucguugguggaguuuacc

SEQ ID NO: 457 - RNA, 19 nt, Artificial Sequence
  Description of Artificial Sequence: Target Sequence/siNA sense region
gggagacauauaucacagc

SEQ ID NO: 458 - RNA, 19 nt, Artificial Sequence
  Description of Artificial Sequence: Target Sequence/siNA sense region
aaccucguggaaggcgaca

SEQ ID NO: 459 - RNA, 19 nt, Artificial Sequence
  Description of Artificial Sequence: Target Sequence/siNA sense region
gggggagacauauaucaca

SEQ ID NO: 460 - RNA, 19 nt, Artificial Sequence
  Description of Artificial Sequence: Target Sequence/siNA sense region
aacguaacaccaaccgccg

SEQ ID NO: 461 - RNA, 19 nt, Artificial Sequence
  Description of Artificial Sequence: Target Sequence/siNA sense region
aaacguaacaccaaccgcc

SEQ ID NO: 462 - RNA, 19 nt, Artificial Sequence
  Description of Artificial Sequence: Target Sequence/siNA sense region
ggggagacauauaucacag

SEQ ID NO: 463 - RNA, 19 nt, Artificial Sequence
  Description of Artificial Sequence: Target Sequence/siNA sense region
gagaugaaggcgaaggcgu

SEQ ID NO: 464 - RNA, 19 nt, Artificial Sequence
  Description of Artificial Sequence: Target Sequence/siNA sense region
aagcggagacggcuggagc

SEQ ID NO: 465 - RNA, 19 nt, Artificial Sequence
  Description of Artificial Sequence: Target Sequence/siNA sense region
guacccuuggccccucuau

SEQ ID NO: 466 - RNA, 19 nt, Artificial Sequence
  Description of Artificial Sequence: Target Sequence/siNA sense region
ccuccaggacccccccucc

SEQ ID NO: 467 - RNA, 19 nt, Artificial Sequence
  Description of Artificial Sequence: Target Sequence/siNA sense region
cuccaggacccccccuccc

SEQ ID NO: 468 - RNA, 19 nt, Artificial Sequence
  Description of Artificial Sequence: Target Sequence/siNA sense region
uacccuuggccccucuaug

SEQ ID NO: 469 - RNA, 19 nt, Artificial Sequence
  Description of Artificial Sequence: Target Sequence/siNA sense region
caaccucguggaaggcgac

SEQ ID NO: 470 - RNA, 19 nt, Artificial Sequence
  Description of Artificial Sequence: Target Sequence/siNA sense region
cggaggcuaugacuaggua

SEQ ID NO: 471 - RNA, 19 nt, Artificial Sequence
  Description of Artificial Sequence: Target Sequence/siNA sense region
ggagaugaaggcgaaggcg

SEQ ID NO: 472 - RNA, 19 nt, Artificial Sequence
  Description of Artificial Sequence: Target Sequence/siNA sense region
agaugaaggcgaaggcguc

SEQ ID NO: 473 - RNA, 19 nt, Artificial Sequence
  Description of Artificial Sequence: Target Sequence/siNA sense region
guaacaccaaccgccgccc

SEQ ID NO: 474 - RNA, 19 nt, Artificial Sequence
  Description of Artificial Sequence: Target Sequence/siNA sense region
cguaacaccaaccgccgcc

SEQ ID NO: 475 - RNA, 19 nt, Artificial Sequence
  Description of Artificial Sequence: Target Sequence/siNA sense region
acguaacaccaaccgccgc

SEQ ID NO: 476 - RNA, 19 nt, Artificial Sequence
  Description of Artificial Sequence: Target Sequence/siNA sense region
cacggaggcuaugacuagg

SEQ ID NO: 477 - RNA, 19 nt, Artificial Sequence
  Description of Artificial Sequence: Target Sequence/siNA sense region
guugguggaguuuaccugu

SEQ ID NO: 478 - RNA, 19 nt, Artificial Sequence
  Description of Artificial Sequence: Target Sequence/siNA sense region
cguugguggaguuuaccug

SEQ ID NO: 479 - RNA, 19 nt, Artificial Sequence
  Description of Artificial Sequence: Target Sequence/siNA sense region
acccuuggccccucuaugg

SEQ ID NO: 480 - RNA, 19 nt, Artificial Sequence
  Description of Artificial Sequence: Target Sequence/siNA sense region
uugguggaguuuaccuguu

SEQ ID NO: 481 - RNA, 19 nt, Artificial Sequence
  Description of Artificial Sequence: Target Sequence/siNA sense region
ugguggaguuuaccuguug

SEQ ID NO: 482 - RNA, 19 nt, Artificial Sequence
  Description of Artificial Sequence: Target Sequence/siNA sense region
ucguugguggaguuuaccu

SEQ ID NO: 483 - RNA, 19 nt, Artificial Sequence
  Description of Artificial Sequence: Target Sequence/siNA sense region
cggguacccuuggccccuc

SEQ ID NO: 484 - RNA, 19 nt, Artificial Sequence
  Description of Artificial Sequence: Target Sequence/siNA sense region
ggcucagcccggguacccu

SEQ ID NO: 485 - RNA, 19 nt, Artificial Sequence
  Description of Artificial Sequence: Target Sequence/siNA sense region
gaucacuccccugugagga

SEQ ID NO: 486 - RNA, 19 nt, Artificial Sequence
  Description of Artificial Sequence: Target Sequence/siNA sense region
gguggucagaucguuggug

SEQ ID NO: 487 - RNA, 19 nt, Artificial Sequence
  Description of Artificial Sequence: Target Sequence/siNA sense region
gaugaaggcgaaggcgucc

SEQ ID NO: 488 - RNA, 19 nt, Artificial Sequence
  Description of Artificial Sequence: Target Sequence/siNA sense region
aggauggcuccugucaccc

SEQ ID NO: 489 - RNA, 19 nt, Artificial Sequence
  Description of Artificial Sequence: Target Sequence/siNA sense region
cucagcccggguacccuug

SEQ ID NO: 490 - RNA, 19 nt, Artificial Sequence
  Description of Artificial Sequence: Target Sequence/siNA sense region
ucagcccggguacccuugg

SEQ ID NO: 491 - RNA, 19 nt, Artificial Sequence
  Description of Artificial Sequence: Target Sequence/siNA sense region
augaaggcgaaggcgucca

SEQ ID NO: 492 - RNA, 19 nt, Artificial Sequence
  Description of Artificial Sequence: Target Sequence/siNA sense region
cgggggagacauauaucac

SEQ ID NO: 493 - RNA, 19 nt, Artificial Sequence
  Description of Artificial Sequence: Target Sequence/siNA sense region
caggauggcuccugucacc

SEQ ID NO: 494 - RNA, 19 nt, Artificial Sequence
  Description of Artificial Sequence: Target Sequence/siNA sense region
ugaaggcgaaggcguccac

SEQ ID NO: 495 - RNA, 19 nt, Artificial Sequence
  Description of Artificial Sequence: Target Sequence/siNA sense region
uggucagaucguuggugga

SEQ ID NO: 496 - RNA, 19 nt, Artificial Sequence
  Description of Artificial Sequence: Target Sequence/siNA sense region
gcucagcccggguacccuu

SEQ ID NO: 497 - RNA, 19 nt, Artificial Sequence
  Description of Artificial Sequence: Target Sequence/siNA sense region
guggucagaucguuggugg

SEQ ID NO: 498 - RNA, 19 nt, Artificial Sequence
  Description of Artificial Sequence: Target Sequence/siNA sense region
cagccuccaggaccccccc

SEQ ID NO: 499 - RNA, 19 nt, Artificial Sequence
  Description of Artificial Sequence: Target Sequence/siNA sense region
ggcgguggucagaucguug

SEQ ID NO: 500 - RNA, 19 nt, Artificial Sequence
  Description of Artificial Sequence: Target Sequence/siNA sense region
gccuccaggacccccccuc

SEQ ID NO: 501 - RNA, 19 nt, Artificial Sequence
  Description of Artificial Sequence: Target Sequence/siNA sense region
aaccggcugauagcguucg

SEQ ID NO: 502 - RNA, 19 nt, Artificial Sequence
  Description of Artificial Sequence: Target Sequence/siNA sense region
agccuccaggacccccccu

SEQ ID NO: 503 - RNA, 19 nt, Artificial Sequence
  Description of Artificial Sequence: Target Sequence/siNA sense region
cggcuucgccgaccucaug

SEQ ID NO: 504 - RNA, 19 nt, Artificial Sequence
  Description of Artificial Sequence: Target Sequence/siNA sense region
gcggagacggcuggagcgc

SEQ ID NO: 505 - RNA, 19 nt, Artificial Sequence
  Description of Artificial Sequence: Target Sequence/siNA sense region
ucaugggguacauuccgcu

SEQ ID NO: 506 - RNA, 19 nt, Artificial Sequence
  Description of Artificial Sequence: Target Sequence/siNA sense region
gaaccggcugauagcguuc

SEQ ID NO: 507 - RNA, 19 nt, Artificial Sequence
  Description of Artificial Sequence: Target Sequence/siNA sense region
gcgguggucagaucguugg

SEQ ID NO: 508 - RNA, 19 nt, Artificial Sequence
  Description of Artificial Sequence: Target Sequence/siNA sense region
ggcaggauggcuccuguca

SEQ ID NO: 509 - RNA, 19 nt, Artificial Sequence
  Description of Artificial Sequence: Target Sequence/siNA sense region
gcaggauggcuccugucac

SEQ ID NO: 510 - RNA, 19 nt, Artificial Sequence
  Description of Artificial Sequence: Target Sequence/siNA sense region
auuuggguaaggucaucga

SEQ ID NO: 511 - RNA, 19 nt, Artificial Sequence
  Description of Artificial Sequence: Target Sequence/siNA sense region
accggcugauagcguucgc

SEQ ID NO: 512 - RNA, 19 nt, Artificial Sequence
  Description of Artificial Sequence: Target Sequence/siNA sense region
cggagacggcuggagcgcg

SEQ ID NO: 513 - RNA, 19 nt, Artificial Sequence
  Description of Artificial Sequence: Target Sequence/siNA sense region
gcggcuucgccgaccucau

SEQ ID NO: 514 - RNA, 19 nt, Artificial Sequence
  Description of Artificial Sequence: Target Sequence/siNA sense region
aauuuggguaaggucaucg

SEQ ID NO: 515 - RNA, 19 nt, Artificial Sequence
  Description of Artificial Sequence: Target Sequence/siNA sense region
gggcgguggucagaucguu

SEQ ID NO: 516 - RNA, 19 nt, Artificial Sequence
  Description of Artificial Sequence: Target Sequence/siNA sense region
caaccgccgcccacaggac

SEQ ID NO: 517 - RNA, 19 nt, Artificial Sequence
  Description of Artificial Sequence: Target Sequence/siNA sense region
ugcggcuucgccgaccuca

SEQ ID NO: 518 - RNA, 19 nt, Artificial Sequence
  Description of Artificial Sequence: Target Sequence/siNA sense region
cgguggucagaucguuggu

SEQ ID NO: 519 - RNA, 19 nt, Artificial Sequence
  Description of Artificial Sequence: Target Sequence/siNA sense region
uugggugugcgcgcgacua

SEQ ID NO: 520 - RNA, 19 nt, Artificial Sequence
  Description of Artificial Sequence: Target Sequence/siNA sense region
gugugcgcgcgacuaggaa

SEQ ID NO: 521 - RNA, 19 nt, Artificial Sequence
  Description of Artificial Sequence: Target Sequence/siNA sense region
gauggcuccugucaccccg

SEQ ID NO: 522 - RNA, 19 nt, Artificial Sequence
  Description of Artificial Sequence: Target Sequence/siNA sense region
ggauggcuccugucacccc

SEQ ID NO: 523 - RNA, 19 nt, Artificial Sequence
  Description of Artificial Sequence: Target Sequence/siNA sense region
ugugcgcgcgacuaggaag

SEQ ID NO: 524 - RNA, 19 nt, Artificial Sequence
  Description of Artificial Sequence: Target Sequence/siNA sense region
ugggugugcgcgcgacuag

SEQ ID NO: 525 - RNA, 19 nt, Artificial Sequence
  Description of Artificial Sequence: Target Sequence/siNA sense region
ggugugcgcgcgacuagga

SEQ ID NO: 526 - RNA, 19 nt, Artificial Sequence
  Description of Artificial Sequence: Target Sequence/siNA sense region
gggugugcgcgcgacuagg

SEQ ID NO: 527 - RNA, 19 nt, Artificial Sequence
  Description of Artificial Sequence: Target Sequence/siNA sense region
ccccggcguaggucgcgua

SEQ ID NO: 528 - RNA, 19 nt, Artificial Sequence
  Description of Artificial Sequence: Target Sequence/siNA sense region
gaaggcgacaaccuauccc

SEQ ID NO: 529 - RNA, 19 nt, Artificial Sequence
  Description of Artificial Sequence: Target Sequence/siNA sense region
cccggcguaggucgcguaa

SEQ ID NO: 530 - RNA, 19 nt, Artificial Sequence
  Description of Artificial Sequence: Target Sequence/siNA sense region
agcggagacggcuggagcg

SEQ ID NO: 531 - RNA, 19 nt, Artificial Sequence
  Description of Artificial Sequence: Target Sequence/siNA sense region
cccccggcguaggucgcgu

SEQ ID NO: 532 - RNA, 19 nt, Artificial Sequence
  Description of Artificial Sequence: Target Sequence/siNA sense region
aggcgaaggcguccacagu

SEQ ID NO: 533 - RNA, 19 nt, Artificial Sequence
  Description of Artificial Sequence: Target Sequence/siNA sense region
aaggcgaaggcguccacag

SEQ ID NO: 534 - RNA, 19 nt, Artificial Sequence
  Description of Artificial Sequence: Target Sequence/siNA sense region
guugggugugcgcgcgacu

SEQ ID NO: 535 - RNA, 19 nt, Artificial Sequence
  Description of Artificial Sequence: Target Sequence/siNA sense region
cucaugggguacauuccgc

SEQ ID NO: 536 - RNA, 19 nt, Artificial Sequence
  Description of Artificial Sequence: Target Sequence/siNA sense region
ggaaggcgacaaccuaucc

SEQ ID NO: 537 - RNA, 19 nt, Artificial Sequence
  Description of Artificial Sequence: Target Sequence/siNA sense region
gcaaguuccuugccgacgg

SEQ ID NO: 538 - RNA, 19 nt, Artificial Sequence
  Description of Artificial Sequence: Target Sequence/siNA sense region
ugcagccuccaggaccccc

SEQ ID NO: 539 - RNA, 19 nt, Artificial Sequence
  Description of Artificial Sequence: Target Sequence/siNA sense region
ggacugcacgaugcucgug

SEQ ID NO: 540 - RNA, 19 nt, Artificial Sequence
  Description of Artificial Sequence: Target Sequence/siNA sense region
gaaggcgaaggcguccaca

SEQ ID NO: 541 - RNA, 19 nt, Artificial Sequence
  Description of Artificial Sequence: Target Sequence/siNA sense region
gcaaccucguggaaggcga

SEQ ID NO: 542 - RNA, 19 nt, Artificial Sequence
  Description of Artificial Sequence: Target Sequence/siNA sense region
gacgcgggcugugcuuggu

SEQ ID NO: 543 - RNA, 19 nt, Artificial Sequence
  Description of Artificial Sequence: Target Sequence/siNA sense region
acgcgggcugugcuuggua

SEQ ID NO: 544 - RNA, 19 nt, Artificial Sequence
  Description of Artificial Sequence: Target Sequence/siNA sense region
gugcagccuccaggacccc

SEQ ID NO: 545 - RNA, 19 nt, Artificial Sequence
  Description of Artificial Sequence: Target Sequence/siNA sense region
gcagccuccaggacccccc

SEQ ID NO: 546 - RNA, 19 nt, Artificial Sequence
  Description of Artificial Sequence: Target Sequence/siNA sense region
cgcaaccucguggaaggcg

SEQ ID NO: 547 - RNA, 19 nt, Artificial Sequence
  Description of Artificial Sequence: Target Sequence/siNA sense region
ugucgugcagccuccagga

SEQ ID NO: 548 - RNA, 19 nt, Artificial Sequence
  Description of Artificial Sequence: Target Sequence/siNA sense region
auggcuugggauaugauga

SEQ ID NO: 549 - RNA, 19 nt, Artificial Sequence
  Description of Artificial Sequence: Target Sequence/siNA sense region
cuugggauaugaugaugaa

SEQ ID NO: 550 - RNA, 19 nt, Artificial Sequence
  Description of Artificial Sequence: Target Sequence/siNA sense region
cccuuggccccucuauggc

SEQ ID NO: 551 - RNA, 19 nt, Artificial Sequence
  Description of Artificial Sequence: Target Sequence/siNA sense region
uggcuugggauaugaugau

SEQ ID NO: 552 - RNA, 19 nt, Artificial Sequence
  Description of Artificial Sequence: Target Sequence/siNA sense region
cugugcaguggaugaaccg

SEQ ID NO: 553 - RNA, 19 nt, Artificial Sequence
  Description of Artificial Sequence: Target Sequence/siNA sense region
augacgcgggcugugcuug

SEQ ID NO: 554 - RNA, 19 nt, Artificial Sequence
  Description of Artificial Sequence: Target Sequence/siNA sense region
gcuugggauaugaugauga

SEQ ID NO: 555 - RNA, 19 nt, Artificial Sequence
  Description of Artificial Sequence: Target Sequence/siNA sense region
uaugacgcgggcugugcuu

SEQ ID NO: 556 - RNA, 19 nt, Artificial Sequence
  Description of Artificial Sequence: Target Sequence/siNA sense region
ugacgcgggcugugcuugg

SEQ ID NO: 557 - RNA, 19 nt, Artificial Sequence
  Description of Artificial Sequence: Target Sequence/siNA sense region
ggcuugggauaugaugaug

SEQ ID NO: 558 - RNA, 19 nt, Artificial Sequence
  Description of Artificial Sequence: Target Sequence/siNA sense region
ugugcaguggaugaaccgg

SEQ ID NO: 559 - RNA, 19 nt, Artificial Sequence
  Description of Artificial Sequence: Target Sequence/siNA sense region
gcugugcaguggaugaacc

SEQ ID NO: 560 - RNA, 19 nt, Artificial Sequence
  Description of Artificial Sequence: Target Sequence/siNA sense region
cucuucaacugggcaguaa

SEQ ID NO: 561 - RNA, 19 nt, Artificial Sequence
  Description of Artificial Sequence: Target Sequence/siNA sense region
ccucguggaaggcgacaac

SEQ ID NO: 562 - RNA, 19 nt, Artificial Sequence
  Description of Artificial Sequence: Target Sequence/siNA sense region
ugugucacccagacagucg

SEQ ID NO: 563 - RNA, 19 nt, Artificial Sequence
  Description of Artificial Sequence: Target Sequence/siNA sense region
ggcgugaacuaugcaacag

SEQ ID NO: 564 - RNA, 19 nt, Artificial Sequence
  Description of Artificial Sequence: Target Sequence/siNA sense region
cggcgugaacuaugcaaca

SEQ ID NO: 565 - RNA, 19 nt, Artificial Sequence
  Description of Artificial Sequence: Target Sequence/siNA sense region
gugucacccagacagucga

SEQ ID NO: 566 - RNA, 19 nt, Artificial Sequence
  Description of Artificial Sequence: Target Sequence/siNA sense region
ccucuucaacugggcagua

SEQ ID NO: 567 - RNA, 19 nt, Artificial Sequence
  Description of Artificial Sequence: Target Sequence/siNA sense region
cguggaaggcgacaaccua

SEQ ID NO: 568 - RNA, 19 nt, Artificial Sequence
  Description of Artificial Sequence: Target Sequence/siNA sense region
ucguggaaggcgacaaccu

SEQ ID NO: 569 - RNA, 19 nt, Artificial Sequence
  Description of Artificial Sequence: Target Sequence/siNA sense region
cggccuaguuggggcccca

SEQ ID NO: 570 - RNA, 19 nt, Artificial Sequence
  Description of Artificial Sequence: Target Sequence/siNA sense region
cgacuaggaagacuuccga

SEQ ID NO: 571 - RNA, 19 nt, Artificial Sequence
  Description of Artificial Sequence: Target Sequence/siNA sense region
uuuggguaaggucaucgau

SEQ ID NO: 572 - RNA, 19 nt, Artificial Sequence
  Description of Artificial Sequence: Target Sequence/siNA sense region
guggaaggcgacaaccuau

SEQ ID NO: 573 - RNA, 19 nt, Artificial Sequence
  Description of Artificial Sequence: Target Sequence/siNA sense region
accucguggaaggcgacaa

SEQ ID NO: 574 - RNA, 19 nt, Artificial Sequence
  Description of Artificial Sequence: Target Sequence/siNA sense region
gcgacuaggaagacuuccg

SEQ ID NO: 575 - RNA, 19 nt, Artificial Sequence
  Description of Artificial Sequence: Target Sequence/siNA sense region
gucgugcagccuccaggac

SEQ ID NO: 576 - RNA, 19 nt, Artificial Sequence
  Description of Artificial Sequence: Target Sequence/siNA sense region
uaggaagacuuccgagcgg

SEQ ID NO: 577 - RNA, 19 nt, Artificial Sequence
  Description of Artificial Sequence: Target Sequence/siNA sense region
acggcgugaacuaugcaac

SEQ ID NO: 578 - RNA, 19 nt, Artificial Sequence
  Description of Artificial Sequence: Target Sequence/siNA sense region
cucguggaaggcgacaacc

SEQ ID NO: 579 - RNA, 19 nt, Artificial Sequence
  Description of Artificial Sequence: Target Sequence/siNA sense region
ggucgcaaccucguggaag

SEQ ID NO: 580 - RNA, 19 nt, Artificial Sequence
  Description of Artificial Sequence: Target Sequence/siNA sense region
cggucgcaaccucguggaa

SEQ ID NO: 581 - RNA, 19 nt, Artificial Sequence
  Description of Artificial Sequence: Target Sequence/siNA sense region
gcgcgcgacuaggaagacu

SEQ ID NO: 582 - RNA, 19 nt, Artificial Sequence
  Description of Artificial Sequence: Target Sequence/siNA sense region
gacggcgugaacuaugcaa

SEQ ID NO: 583 - RNA, 19 nt, Artificial Sequence
  Description of Artificial Sequence: Target Sequence/siNA sense region
uagaucacuccccugugag

SEQ ID NO: 584 - RNA, 19 nt, Artificial Sequence
  Description of Artificial Sequence: Target Sequence/siNA sense region
agcggucgcaaccucgugg

SEQ ID NO: 585 - RNA, 19 nt, Artificial Sequence
  Description of Artificial Sequence: Target Sequence/siNA sense region
uggaaggcgacaaccuauc

SEQ ID NO: 586 - RNA, 19 nt, Artificial Sequence
  Description of Artificial Sequence: Target Sequence/siNA sense region
cgcgcgacuaggaagacuu

SEQ ID NO: 587 - RNA, 19 nt, Artificial Sequence
  Description of Artificial Sequence: Target Sequence/siNA sense region
cuaggaagacuuccgagcg

SEQ ID NO: 588 - RNA, 19 nt, Artificial Sequence
  Description of Artificial Sequence: Target Sequence/siNA sense region
gugcgcgcgacuaggaaga

SEQ ID NO: 589 - RNA, 19 nt, Artificial Sequence
  Description of Artificial Sequence: Target Sequence/siNA sense region
agaucacuccccugugagg

SEQ ID NO: 590 - RNA, 19 nt, Artificial Sequence
  Description of Artificial Sequence: Target Sequence/siNA sense region
ugcgcgcgacuaggaagac

SEQ ID NO: 591 - RNA, 19 nt, Artificial Sequence
  Description of Artificial Sequence: Target Sequence/siNA sense region
auagaucacuccccuguga

SEQ ID NO: 592 - RNA, 19 nt, Artificial Sequence
  Description of Artificial Sequence: Target Sequence/siNA sense region
gagcggucgcaaccucgug

SEQ ID NO: 593 - RNA, 19 nt, Artificial Sequence
  Description of Artificial Sequence: Target Sequence/siNA sense region
cacgaacgacugcuccaac

SEQ ID NO: 594 - RNA, 19 nt, Artificial Sequence
  Description of Artificial Sequence: Target Sequence/siNA sense region
ggcaaguuccuugccgacg

SEQ ID NO: 595 - RNA, 19 nt, Artificial Sequence
  Description of Artificial Sequence: Target Sequence/siNA sense region
ucgugcagccuccaggacc

SEQ ID NO: 596 - RNA, 19 nt, Artificial Sequence
  Description of Artificial Sequence: Target Sequence/siNA sense region
gucacgaacgacugcucca

SEQ ID NO: 597 - RNA, 19 nt, Artificial Sequence
  Description of Artificial Sequence: Target Sequence/siNA sense region
gcggucgcaaccucgugga

SEQ ID NO: 598 - RNA, 19 nt, Artificial Sequence
  Description of Artificial Sequence: Target Sequence/siNA sense region
gcgcgacuaggaagacuuc

SEQ ID NO: 599 - RNA, 19 nt, Artificial Sequence
  Description of Artificial Sequence: Target Sequence/siNA sense region
gcuaugacgcgggcugugc

SEQ ID NO: 600 - RNA, 19 nt, Artificial Sequence
  Description of Artificial Sequence: Target Sequence/siNA sense region
ucacgaacgacugcuccaa

SEQ ID NO: 601 - RNA, 19 nt, Artificial Sequence
  Description of Artificial Sequence: Target Sequence/siNA sense region
ucgcaaccucguggaaggc

SEQ ID NO: 602 - RNA, 19 nt, Artificial Sequence
  Description of Artificial Sequence: Target Sequence/siNA sense region
cgugcagccuccaggaccc

SEQ ID NO: 603 - RNA, 19 nt, Artificial Sequence
  Description of Artificial Sequence: Target Sequence/siNA sense region
gucgcaaccucguggaagg

SEQ ID NO: 604 - RNA, 19 nt, Artificial Sequence
  Description of Artificial Sequence: Target Sequence/siNA sense region
acuaggaagacuuccgagc

SEQ ID NO: 605 - RNA, 19 nt, Artificial Sequence
  Description of Artificial Sequence: Target Sequence/siNA sense region
cgcgacuaggaagacuucc

SEQ ID NO: 606 - RNA, 19 nt, Artificial Sequence
  Description of Artificial Sequence: Target Sequence/siNA sense region
ugggcgaagcacaugugga

SEQ ID NO: 607 - RNA, 19 nt, Artificial Sequence
  Description of Artificial Sequence: Target Sequence/siNA sense region
ccuugccuacuauuccaug

SEQ ID NO: 608 - RNA, 19 nt, Artificial Sequence
  Description of Artificial Sequence: Target Sequence/siNA sense region
gccucaggaaacuuggggu

SEQ ID NO: 609 - RNA, 19 nt, Artificial Sequence
  Description of Artificial Sequence: Target Sequence/siNA sense region
ugcuaugacgcgggcugug

SEQ ID NO: 610 - RNA, 19 nt, Artificial Sequence
  Description of Artificial Sequence: Target Sequence/siNA sense region
ucgugcucgccaccgcuac

SEQ ID NO: 611 - RNA, 19 nt, Artificial Sequence
  Description of Artificial Sequence: Target Sequence/siNA sense region
ugccucaggaaacuugggg

SEQ ID NO: 612 - RNA, 19 nt, Artificial Sequence
  Description of Artificial Sequence: Target Sequence/siNA sense region
ugucucgugcccgaccccg

SEQ ID NO: 613 - RNA, 19 nt, Artificial Sequence
  Description of Artificial Sequence: Target Sequence/siNA sense region
uguggcggcaggagauggg

SEQ ID NO: 614 - RNA, 19 nt, Artificial Sequence
  Description of Artificial Sequence: Target Sequence/siNA sense region
gucgugcucgccaccgcua

SEQ ID NO: 615 - RNA, 19 nt, Artificial Sequence
  Description of Artificial Sequence: Target Sequence/siNA sense region
gauuuccacuacgugacgg

SEQ ID NO: 616 - RNA, 19 nt, Artificial Sequence
  Description of Artificial Sequence: Target Sequence/siNA sense region
gggccuugccuacuauucc

SEQ ID NO: 617 - RNA, 19 nt, Artificial Sequence
  Description of Artificial Sequence: Target Sequence/siNA sense region
gccuugccuacuauuccau

SEQ ID NO: 618 - RNA, 19 nt, Artificial Sequence
  Description of Artificial Sequence: Target Sequence/siNA sense region
gacuaggaagacuuccgag

SEQ ID NO: 619 - RNA, 19 nt, Artificial Sequence
  Description of Artificial Sequence: Target Sequence/siNA sense region
gcgggggagacauauauca

SEQ ID NO: 620 - RNA, 19 nt, Artificial Sequence
  Description of Artificial Sequence: Target Sequence/siNA sense region
cgagcggucgcaaccucgu

SEQ ID NO: 621 - RNA, 19 nt, Artificial Sequence
  Description of Artificial Sequence: Target Sequence/siNA sense region
ggccuugccuacuauucca

SEQ ID NO: 622 - RNA, 19 nt, Artificial Sequence
  Description of Artificial Sequence: Target Sequence/siNA sense region
auuuccacuacgugacggg

SEQ ID NO: 623 - RNA, 19 nt, Artificial Sequence
  Description of Artificial Sequence: Target Sequence/siNA sense region
ggacgucaaguucccgggc

SEQ ID NO: 624 - RNA, 19 nt, Artificial Sequence
  Description of Artificial Sequence: Target Sequence/siNA sense region
gagugcuaugacgcgggcu

SEQ ID NO: 625 - RNA, 19 nt, Artificial Sequence
  Description of Artificial Sequence: Target Sequence/siNA sense region
gacgucaaguucccgggcg

SEQ ID NO: 626 - RNA, 19 nt, Artificial Sequence
  Description of Artificial Sequence: Target Sequence/siNA sense region
ucagcgacgggucuugguc

SEQ ID NO: 627 - RNA, 19 nt, Artificial Sequence
  Description of Artificial Sequence: Target Sequence/siNA sense region
ucaaguucccgggcggugg

SEQ ID NO: 628 - RNA, 19 nt, Artificial Sequence
  Description of Artificial Sequence: Target Sequence/siNA sense region
ucaaggagaugaaggcgaa

SEQ ID NO: 629 - RNA, 19 nt, Artificial Sequence
  Description of Artificial Sequence: Target Sequence/siNA sense region
ccuauccccaaggcucgcc

SEQ ID NO: 630 - RNA, 19 nt, Artificial Sequence
  Description of Artificial Sequence: Target Sequence/siNA sense region
cuugaccuaccucagauca

SEQ ID NO: 631 - RNA, 19 nt, Artificial Sequence
  Description of Artificial Sequence: Target Sequence/siNA sense region
uuuccacuacgugacgggc

SEQ ID NO: 632 - RNA, 19 nt, Artificial Sequence
  Description of Artificial Sequence: Target Sequence/siNA sense region
agugcuaugacgcgggcug

SEQ ID NO: 633 - RNA, 19 nt, Artificial Sequence
  Description of Artificial Sequence: Target Sequence/siNA sense region
acgucaaguucccgggcgg

SEQ ID NO: 634 - RNA, 19 nt, Artificial Sequence
  Description of Artificial Sequence: Target Sequence/siNA sense region
ucuggagacaucgggccag

SEQ ID NO: 635 - RNA, 19 nt, Artificial Sequence
  Description of Artificial Sequence: Target Sequence/siNA sense region
gggcgaagcacauguggaa

SEQ ID NO: 636 - RNA, 19 nt, Artificial Sequence
  Description of Artificial Sequence: Target Sequence/siNA sense region
uugaccuaccucagaucau

SEQ ID NO: 637 - RNA, 19 nt, Artificial Sequence
  Description of Artificial Sequence: Target Sequence/siNA sense region
ccaagcggagacggcugga

SEQ ID NO: 638 - RNA, 19 nt, Artificial Sequence
  Description of Artificial Sequence: Target Sequence/siNA sense region
accaagcggagacggcugg

SEQ ID NO: 639 - RNA, 19 nt, Artificial Sequence
  Description of Artificial Sequence: Target Sequence/siNA sense region
ggguggcuucaugccucag

SEQ ID NO: 640 - RNA, 19 nt, Artificial Sequence
  Description of Artificial Sequence: Target Sequence/siNA sense region
gucaaguucccgggcggug

SEQ ID NO: 641 - RNA, 19 nt, Artificial Sequence
  Description of Artificial Sequence: Target Sequence/siNA sense region
cucaaggagaugaaggcga

SEQ ID NO: 642 - RNA, 19 nt, Artificial Sequence
  Description of Artificial Sequence: Target Sequence/siNA sense region
gaccaagcggagacggcug

SEQ ID NO: 643 - RNA, 19 nt, Artificial Sequence
  Description of Artificial Sequence: Target Sequence/siNA sense region
uccaggucgggcucaacca

SEQ ID NO: 644 - RNA, 19 nt, Artificial Sequence
  Description of Artificial Sequence: Target Sequence/siNA sense region
cucuuucucuaucuuccuc

SEQ ID NO: 645 - RNA, 19 nt, Artificial Sequence
  Description of Artificial Sequence: Target Sequence/siNA sense region
gucuggagacaucgggcca

SEQ ID NO: 646 - RNA, 19 nt, Artificial Sequence
  Description of Artificial Sequence: Target Sequence/siNA sense region
guugugacuuggcccccga

SEQ ID NO: 647 - RNA, 19 nt, Artificial Sequence
  Description of Artificial Sequence: Target Sequence/siNA sense region
agaccuggcuccaguccaa

SEQ ID NO: 648 - RNA, 19 nt, Artificial Sequence
  Description of Artificial Sequence: Target Sequence/siNA sense region
cuugccuacuauuccaugg

SEQ ID NO: 649 - RNA, 19 nt, Artificial Sequence
  Description of Artificial Sequence: Target Sequence/siNA sense region
cccgguugcucuuucucua

SEQ ID NO: 650 - RNA, 19 nt, Artificial Sequence
  Description of Artificial Sequence: Target Sequence/siNA sense region
cuuucucuaucuuccucuu

SEQ ID NO: 651 - RNA, 19 nt, Artificial Sequence
  Description of Artificial Sequence: Target Sequence/siNA sense region
aggguggcuucaugccuca

SEQ ID NO: 652 - RNA, 19 nt, Artificial Sequence
  Description of Artificial Sequence: Target Sequence/siNA sense region
aagaccuggcuccagucca

SEQ ID NO: 653 - RNA, 19 nt, Artificial Sequence
  Description of Artificial Sequence: Target Sequence/siNA sense region
ccgguugcucuuucucuau

SEQ ID NO: 654 - RNA, 19 nt, Artificial Sequence
  Description of Artificial Sequence: Target Sequence/siNA sense region
cgguugcucuuucucuauc

SEQ ID NO: 655 - RNA, 19 nt, Artificial Sequence
  Description of Artificial Sequence: Target Sequence/siNA sense region
ugggggauuuccacuacgu

SEQ ID NO: 656 - RNA, 19 nt, Artificial Sequence
  Description of Artificial Sequence: Target Sequence/siNA sense region
augucacgaacgacugcuc

SEQ ID NO: 657 - RNA, 19 nt, Artificial Sequence
  Description of Artificial Sequence: Target Sequence/siNA sense region
ggccuaguuggggccccac

SEQ ID NO: 658 - RNA, 19 nt, Artificial Sequence
  Description of Artificial Sequence: Target Sequence/siNA sense region
uggaccaagcggagacggc

SEQ ID NO: 659 - RNA, 19 nt, Artificial Sequence
  Description of Artificial Sequence: Target Sequence/siNA sense region
uuccaggucgggcucaacc

SEQ ID NO: 660 - RNA, 19 nt, Artificial Sequence
  Description of Artificial Sequence: Target Sequence/siNA sense region
agcgggucgaguuccuggu

SEQ ID NO: 661 - RNA, 19 nt, Artificial Sequence
  Description of Artificial Sequence: Target Sequence/siNA sense region
caaggagaugaaggcgaag

SEQ ID NO: 662 - RNA, 19 nt, Artificial Sequence
  Description of Artificial Sequence: Target Sequence/siNA sense region
caugucacgaacgacugcu

SEQ ID NO: 663 - RNA, 19 nt, Artificial Sequence
  Description of Artificial Sequence: Target Sequence/siNA sense region
cagcgggucgaguuccugg

SEQ ID NO: 664 - RNA, 19 nt, Artificial Sequence
  Description of Artificial Sequence: Target Sequence/siNA sense region
uuccacuacgugacgggca

SEQ ID NO: 665 - RNA, 19 nt, Artificial Sequence
  Description of Artificial Sequence: Target Sequence/siNA sense region
uaggguggcuucaugccuc

SEQ ID NO: 666 - RNA, 19 nt, Artificial Sequence
  Description of Artificial Sequence: Target Sequence/siNA sense region
uccaggacugcacgaugcu

SEQ ID NO: 667 - RNA, 19 nt, Artificial Sequence
  Description of Artificial Sequence: Target Sequence/siNA sense region
uccacuacgugacgggcau

SEQ ID NO: 668 - RNA, 19 nt, Artificial Sequence
  Description of Artificial Sequence: Target Sequence/siNA sense region
aauaggguggcuucaugcc

SEQ ID NO: 669 - RNA, 19 nt, Artificial Sequence
  Description of Artificial Sequence: Target Sequence/siNA sense region
gucuucacggaggcuauga

SEQ ID NO: 670 - RNA, 19 nt, Artificial Sequence
  Description of Artificial Sequence: Target Sequence/siNA sense region
auaggguggcuucaugccu

SEQ ID NO: 671 - RNA, 19 nt, Artificial Sequence
  Description of Artificial Sequence: Target Sequence/siNA sense region
ucuucacggaggcuaugac

SEQ ID NO: 672 - RNA, 19 nt, Artificial Sequence
  Description of Artificial Sequence: Target Sequence/siNA sense region
augccucaggaaacuuggg

SEQ ID NO: 673 - RNA, 19 nt, Artificial Sequence
  Description of Artificial Sequence: Target Sequence/siNA sense region
accgggacgugcucaagga

SEQ ID NO: 674 - RNA, 19 nt, Artificial Sequence
  Description of Artificial Sequence: Target Sequence/siNA sense region
ggggcugugcaguggauga

SEQ ID NO: 675 - RNA, 19 nt, Artificial Sequence
  Description of Artificial Sequence: Target Sequence/siNA sense region
aagcuccaggacugcacga

SEQ ID NO: 676 - RNA, 19 nt, Artificial Sequence
  Description of Artificial Sequence: Target Sequence/siNA sense region
gcuccaggacugcacgaug

SEQ ID NO: 677 - RNA, 19 nt, Artificial Sequence
  Description of Artificial Sequence: Target Sequence/siNA sense region
uaccgggacgugcucaagg

SEQ ID NO: 678 - RNA, 19 nt, Artificial Sequence
  Description of Artificial Sequence: Target Sequence/siNA sense region
gggcugugcaguggaugaa

SEQ ID NO: 679 - RNA, 19 nt, Artificial Sequence
  Description of Artificial Sequence: Target Sequence/siNA sense region
cgucaaguucccgggcggu

SEQ ID NO: 680 - RNA, 19 nt, Artificial Sequence
  Description of Artificial Sequence: Target Sequence/siNA sense region
ucaauaggguggcuucaug

SEQ ID NO: 681 - RNA, 19 nt, Artificial Sequence
  Description of Artificial Sequence: Target Sequence/siNA sense region
agucuucacggaggcuaug

SEQ ID NO: 682 - RNA, 19 nt, Artificial Sequence
  Description of Artificial Sequence: Target Sequence/siNA sense region
ggaccaagcggagacggcu

SEQ ID NO: 683 - RNA, 19 nt, Artificial Sequence
  Description of Artificial Sequence: Target Sequence/siNA sense region
ggcuccaguccaagcuccu

SEQ ID NO: 684 - RNA, 19 nt, Artificial Sequence
  Description of Artificial Sequence: Target Sequence/siNA sense region
ggcugugcaguggaugaac

SEQ ID NO: 685 - RNA, 19 nt, Artificial Sequence
  Description of Artificial Sequence: Target Sequence/siNA sense region
cuccaggacugcacgaugc

SEQ ID NO: 686 - RNA, 19 nt, Artificial Sequence
  Description of Artificial Sequence: Target Sequence/siNA sense region
gagucuucacggaggcuau

SEQ ID NO: 687 - RNA, 19 nt, Artificial Sequence
  Description of Artificial Sequence: Target Sequence/siNA sense region
uggcuccaguccaagcucc

SEQ ID NO: 688 - RNA, 19 nt, Artificial Sequence
  Description of Artificial Sequence: Target Sequence/siNA sense region
ggggauuuccacuacguga

SEQ ID NO: 689 - RNA, 19 nt, Artificial Sequence
  Description of Artificial Sequence: Target Sequence/siNA sense region
caugccucaggaaacuugg

SEQ ID NO: 690 - RNA, 19 nt, Artificial Sequence
  Description of Artificial Sequence: Target Sequence/siNA sense region
aucaauaggguggcuucau

SEQ ID NO: 691 - RNA, 19 nt, Artificial Sequence
  Description of Artificial Sequence: Target Sequence/siNA sense region
gcgggccuugccuacuauu

SEQ ID NO: 692 - RNA, 19 nt, Artificial Sequence
  Description of Artificial Sequence: Target Sequence/siNA sense region
ccgggacgugcucaaggag

SEQ ID NO: 693 - RNA, 19 nt, Artificial Sequence
  Description of Artificial Sequence: Target Sequence/siNA sense region
ccaugguggggaacugggc

SEQ ID NO: 694 - RNA, 19 nt, Artificial Sequence
  Description of Artificial Sequence: Target Sequence/siNA sense region
caauaggguggcuucaugc

SEQ ID NO: 695 - RNA, 19 nt, Artificial Sequence
  Description of Artificial Sequence: Target Sequence/siNA sense region
agcuccaggacugcacgau

SEQ ID NO: 696 - RNA, 19 nt, Artificial Sequence
  Description of Artificial Sequence: Target Sequence/siNA sense region
cgggccuugccuacuauuc

SEQ ID NO: 697 - RNA, 19 nt, Artificial Sequence
  Description of Artificial Sequence: Target Sequence/siNA antisense region
cuacgagaccucccggggc

SEQ ID NO: 698 - RNA, 19 nt, Artificial Sequence
  Description of Artificial Sequence: Target Sequence/siNA antisense region
ccuaucaggcaguaccaca

SEQ ID NO: 699 - RNA, 19 nt, Artificial Sequence
  Description of Artificial Sequence: Target Sequence/siNA antisense region
cuaucaggcaguaccacaa

SEQ ID NO: 700 - RNA, 19 nt, Artificial Sequence
  Description of Artificial Sequence: Target Sequence/siNA antisense region
ucuacgagaccucccgggg

SEQ ID NO: 701 - RNA, 19 nt, Artificial Sequence
  Description of Artificial Sequence: Target Sequence/siNA antisense region
cccuaucaggcaguaccac

SEQ ID NO: 702 - RNA, 19 nt, Artificial Sequence
  Description of Artificial Sequence: Target Sequence/siNA antisense region
caagcacccuaucaggcag

SEQ ID NO: 703 - RNA, 19 nt, Artificial Sequence
  Description of Artificial Sequence: Target Sequence/siNA antisense region
aucaggcaguaccacaagg

SEQ ID NO: 704 - RNA, 19 nt, Artificial Sequence
  Description of Artificial Sequence: Target Sequence/siNA antisense region
guaccacaaggccuuucgc

SEQ ID NO: 705 - RNA, 19 nt, Artificial Sequence
  Description of Artificial Sequence: Target Sequence/siNA antisense region
agcacccuaucaggcagua

SEQ ID NO: 706 - RNA, 19 nt, Artificial Sequence
  Description of Artificial Sequence: Target Sequence/siNA antisense region
cacccuaucaggcaguacc

SEQ ID NO: 707 - RNA, 19 nt, Artificial Sequence
  Description of Artificial Sequence: Target Sequence/siNA antisense region
gcaguaccacaaggccuuu

SEQ ID NO: 708 - RNA, 19 nt, Artificial Sequence
  Description of Artificial Sequence: Target Sequence/siNA antisense region
ggcaguaccacaaggccuu

SEQ ID NO: 709 - RNA, 19 nt, Artificial Sequence
  Description of Artificial Sequence: Target Sequence/siNA antisense region
uaucaggcaguaccacaag

SEQ ID NO: 710 - RNA, 19 nt, Artificial Sequence
  Description of Artificial Sequence: Target Sequence/siNA antisense region
aggcaguaccacaaggccu

SEQ ID NO: 711 - RNA, 19 nt, Artificial Sequence
  Description of Artificial Sequence: Target Sequence/siNA antisense region
gcacccuaucaggcaguac

SEQ ID NO: 712 - RNA, 19 nt, Artificial Sequence
  Description of Artificial Sequence: Target Sequence/siNA antisense region
aagcacccuaucaggcagu

SEQ ID NO: 713 - RNA, 19 nt, Artificial Sequence
  Description of Artificial Sequence: Target Sequence/siNA antisense region
cucccggggcacucgcaag

SEQ ID NO: 714 - RNA, 19 nt, Artificial Sequence
  Description of Artificial Sequence: Target Sequence/siNA antisense region
cucgcaagcacccuaucag

SEQ ID NO: 715 - RNA, 19 nt, Artificial Sequence
  Description of Artificial Sequence: Target Sequence/siNA antisense region
ccucccggggcacucgcaa

SEQ ID NO: 716 - RNA, 19 nt, Artificial Sequence
  Description of Artificial Sequence: Target Sequence/siNA antisense region
ucgcaagcacccuaucagg

SEQ ID NO: 717 - RNA, 19 nt, Artificial Sequence
  Description of Artificial Sequence: Target Sequence/siNA antisense region
caggcaguaccacaaggcc

SEQ ID NO: 718 - RNA, 19 nt, Artificial Sequence
  Description of Artificial Sequence: Target Sequence/siNA antisense region
ucccggggcacucgcaagc

SEQ ID NO: 719 - RNA, 19 nt, Artificial Sequence
  Description of Artificial Sequence: Target Sequence/siNA antisense region
gcaagcacccuaucaggca

SEQ ID NO: 720 - RNA, 19 nt, Artificial Sequence
  Description of Artificial Sequence: Target Sequence/siNA antisense region
caguaccacaaggccuuuc

SEQ ID NO: 721 - RNA, 19 nt, Artificial Sequence
  Description of Artificial Sequence: Target Sequence/siNA antisense region
cgcaagcacccuaucaggc

SEQ ID NO: 722 - RNA, 19 nt, Artificial Sequence
  Description of Artificial Sequence: Target Sequence/siNA antisense region
aguaccacaaggccuuucg

SEQ ID NO: 723 - RNA, 19 nt, Artificial Sequence
  Description of Artificial Sequence: Target Sequence/siNA antisense region
ucaggcaguaccacaaggc

SEQ ID NO: 724 - RNA, 19 nt, Artificial Sequence
  Description of Artificial Sequence: Target Sequence/siNA antisense region
gagaccucccggggcacuc

SEQ ID NO: 725 - RNA, 19 nt, Artificial Sequence
  Description of Artificial Sequence: Target Sequence/siNA antisense region
gucuacgagaccucccggg

SEQ ID NO: 726 - RNA, 19 nt, Artificial Sequence
  Description of Artificial Sequence: Target Sequence/siNA antisense region
accucccggggcacucgca

SEQ ID NO: 727 - RNA, 19 nt, Artificial Sequence
  Description of Artificial Sequence: Target Sequence/siNA antisense region
acccuaucaggcaguacca

SEQ ID NO: 728 - RNA, 19 nt, Artificial Sequence
  Description of Artificial Sequence: Target Sequence/siNA antisense region
auuccgguguacucaccgg

SEQ ID NO: 729 - RNA, 19 nt, Artificial Sequence
  Description of Artificial Sequence: Target Sequence/siNA antisense region
gaccucccggggcacucgc

SEQ ID NO: 730 - RNA, 19 nt, Artificial Sequence
  Description of Artificial Sequence: Target Sequence/siNA antisense region
agaccucccggggcacucg

SEQ ID NO: 731 - RNA, 19 nt, Artificial Sequence
  Description of Artificial Sequence: Target Sequence/siNA antisense region
uacgagaccucccggggca

SEQ ID NO: 732 - RNA, 19 nt, Artificial Sequence
  Description of Artificial Sequence: Target Sequence/siNA antisense region
acgagaccucccggggcac

SEQ ID NO: 733 - RNA, 19 nt, Artificial Sequence
  Description of Artificial Sequence: Target Sequence/siNA antisense region
cgagaccucccggggcacu

SEQ ID NO: 734 - RNA, 19 nt, Artificial Sequence
  Description of Artificial Sequence: Target Sequence/siNA antisense region
ggucuacgagaccucccgg

SEQ ID NO: 735 - RNA, 19 nt, Artificial Sequence
  Description of Artificial Sequence: Target Sequence/siNA antisense region
acucgcaagcacccuauca

SEQ ID NO: 736 - RNA, 19 nt, Artificial Sequence
  Description of Artificial Sequence: Target Sequence/siNA antisense region
ccggggcacucgcaagcac

SEQ ID NO: 737 - RNA, 19 nt, Artificial Sequence
  Description of Artificial Sequence: Target Sequence/siNA antisense region
gcacucgcaagcacccuau

SEQ ID NO: 738 - RNA, 19 nt, Artificial Sequence
  Description of Artificial Sequence: Target Sequence/siNA antisense region
ggggcacucgcaagcaccc

SEQ ID NO: 739 - RNA, 19 nt, Artificial Sequence
  Description of Artificial Sequence: Target Sequence/siNA antisense region
cggucuacgagaccucccg

SEQ ID NO: 740 - RNA, 19 nt, Artificial Sequence
  Description of Artificial Sequence: Target Sequence/siNA antisense region
acggucuacgagaccuccc

SEQ ID NO: 741 - RNA, 19 nt, Artificial Sequence
  Description of Artificial Sequence: Target Sequence/siNA antisense region
cacucgcaagcacccuauc

SEQ ID NO: 742 - RNA, 19 nt, Artificial Sequence
  Description of Artificial Sequence: Target Sequence/siNA antisense region
cacggucuacgagaccucc

SEQ ID NO: 743 - RNA, 19 nt, Artificial Sequence
  Description of Artificial Sequence: Target Sequence/siNA antisense region
gggcacucgcaagcacccu

SEQ ID NO: 744 - RNA, 19 nt, Artificial Sequence
  Description of Artificial Sequence: Target Sequence/siNA antisense region
cccggggcacucgcaagca

SEQ ID NO: 745 - RNA, 19 nt, Artificial Sequence
  Description of Artificial Sequence: Target Sequence/siNA antisense region
cggggcacucgcaagcacc

SEQ ID NO: 746 - RNA, 19 nt, Artificial Sequence
  Description of Artificial Sequence: Target Sequence/siNA antisense region
ggcacucgcaagcacccua

SEQ ID NO: 747 - RNA, 19 nt, Artificial Sequence
  Description of Artificial Sequence: Target Sequence/siNA antisense region
ugcacggucuacgagaccu

SEQ ID NO: 748 - RNA, 19 nt, Artificial Sequence
  Description of Artificial Sequence: Target Sequence/siNA antisense region
gcacggucuacgagaccuc

SEQ ID NO: 749 - RNA, 19 nt, Artificial Sequence
  Description of Artificial Sequence: Target Sequence/siNA antisense region
cgguguacucaccgguucc

SEQ ID NO: 750 - RNA, 19 nt, Artificial Sequence
  Description of Artificial Sequence: Target Sequence/siNA antisense region
gguguacucaccgguuccg

SEQ ID NO: 751 - RNA, 19 nt, Artificial Sequence
  Description of Artificial Sequence: Target Sequence/siNA antisense region
aauuccgguguacucaccg

SEQ ID NO: 752 - RNA, 19 nt, Artificial Sequence
  Description of Artificial Sequence: Target Sequence/siNA antisense region
guguacucaccgguuccgc

SEQ ID NO: 753 - RNA, 19 nt, Artificial Sequence
  Description of Artificial Sequence: Target Sequence/siNA antisense region
uccgguguacucaccgguu

SEQ ID NO: 754 - RNA, 19 nt, Artificial Sequence
  Description of Artificial Sequence: Target Sequence/siNA antisense region
uuccgguguacucaccggu

SEQ ID NO: 755 - RNA, 19 nt, Artificial Sequence
  Description of Artificial Sequence: Target Sequence/siNA antisense region
guacucaccgguuccgcag

SEQ ID NO: 756 - RNA, 19 nt, Artificial Sequence
  Description of Artificial Sequence: Target Sequence/siNA antisense region
acucaccgguuccgcagac

SEQ ID NO: 757 - RNA, 19 nt, Artificial Sequence
  Description of Artificial Sequence: Target Sequence/siNA antisense region
ccgguguacucaccgguuc

SEQ ID NO: 758 - RNA, 19 nt, Artificial Sequence
  Description of Artificial Sequence: Target Sequence/siNA antisense region
uguacucaccgguuccgca

SEQ ID NO: 759 - RNA, 19 nt, Artificial Sequence
  Description of Artificial Sequence: Target Sequence/siNA antisense region
uacucaccgguuccgcaga

SEQ ID NO: 760 - RNA, 19 nt, Artificial Sequence
  Description of Artificial Sequence: Target Sequence/siNA antisense region
agaccacuauggcucuccc

SEQ ID NO: 761 - RNA, 19 nt, Artificial Sequence
  Description of Artificial Sequence: Target Sequence/siNA antisense region
caccgguuccgcagaccac

SEQ ID NO: 762 - RNA, 19 nt, Artificial Sequence
  Description of Artificial Sequence: Target Sequence/siNA antisense region
cucaccgguuccgcagacc

SEQ ID NO: 763 - RNA, 19 nt, Artificial Sequence
  Description of Artificial Sequence: Target Sequence/siNA antisense region
gaccacuauggcucucccg

SEQ ID NO: 764 - RNA, 19 nt, Artificial Sequence
  Description of Artificial Sequence: Target Sequence/siNA antisense region
accacuauggcucucccgg

SEQ ID NO: 765 - RNA, 19 nt, Artificial Sequence
  Description of Artificial Sequence: Target Sequence/siNA antisense region
ucaccgguuccgcagacca

SEQ ID NO: 766 - RNA, 19 nt, Artificial Sequence
  Description of Artificial Sequence: Target Sequence/siNA antisense region
gcaauuccgguguacucac

SEQ ID NO: 767 - RNA, 19 nt, Artificial Sequence
  Description of Artificial Sequence: Target Sequence/siNA antisense region
ggcaauuccgguguacuca

SEQ ID NO: 768 - RNA, 19 nt, Artificial Sequence
  Description of Artificial Sequence: Target Sequence/siNA antisense region
caauuccgguguacucacc

SEQ ID NO: 769 - RNA, 19 nt, Artificial Sequence
  Description of Artificial Sequence: Target Sequence/siNA antisense region
ccgcagaccacuauggcuc

SEQ ID NO: 770 - RNA, 19 nt, Artificial Sequence
  Description of Artificial Sequence: Target Sequence/siNA antisense region
cgcagaccacuauggcucu

SEQ ID NO: 771 - RNA, 19 nt, Artificial Sequence
  Description of Artificial Sequence: Target Sequence/siNA antisense region
ccgguuccgcagaccacua

SEQ ID NO: 772 - RNA, 19 nt, Artificial Sequence
  Description of Artificial Sequence: Target Sequence/siNA antisense region
cgguuccgcagaccacuau

SEQ ID NO: 773 - RNA, 19 nt, Artificial Sequence
  Description of Artificial Sequence: Target Sequence/siNA antisense region
gcagaccacuauggcucuc

SEQ ID NO: 774 - RNA, 19 nt, Artificial Sequence
  Description of Artificial Sequence: Target Sequence/siNA antisense region
uuccgcagaccacuauggc

SEQ ID NO: 775 - RNA, 19 nt, Artificial Sequence
  Description of Artificial Sequence: Target Sequence/siNA antisense region
accgguuccgcagaccacu

SEQ ID NO: 776 - RNA, 19 nt, Artificial Sequence
  Description of Artificial Sequence: Target Sequence/siNA antisense region
gguuccgcagaccacuaug

SEQ ID NO: 777 - RNA, 19 nt, Artificial Sequence
  Description of Artificial Sequence: Target Sequence/siNA antisense region
uccgcagaccacuauggcu

SEQ ID NO: 778 - RNA, 19 nt, Artificial Sequence
  Description of Artificial Sequence: Target Sequence/siNA antisense region
guuccgcagaccacuaugg

SEQ ID NO: 779 - RNA, 19 nt, Artificial Sequence
  Description of Artificial Sequence: Target Sequence/siNA antisense region
auggcucucccgggagggg

SEQ ID NO: 780 - RNA, 19 nt, Artificial Sequence
  Description of Artificial Sequence: Target Sequence/siNA antisense region
cagaccacuauggcucucc

SEQ ID NO: 781 - RNA, 19 nt, Artificial Sequence
  Description of Artificial Sequence: Target Sequence/siNA antisense region
ccacuauggcucucccggg

SEQ ID NO: 782 - RNA, 19 nt, Artificial Sequence
  Description of Artificial Sequence: Target Sequence/siNA antisense region
uggcucucccgggaggggg

SEQ ID NO: 783 - RNA, 19 nt, Artificial Sequence
  Description of Artificial Sequence: Target Sequence/siNA antisense region
cacuauggcucucccggga

SEQ ID NO: 784 - RNA, 19 nt, Artificial Sequence
  Description of Artificial Sequence: Target Sequence/siNA antisense region
ggcucucccgggagggggg

SEQ ID NO: 785 - RNA, 19 nt, Artificial Sequence
  Description of Artificial Sequence: Target Sequence/siNA antisense region
uauggcucucccgggaggg

SEQ ID NO: 786 - RNA, 19 nt, Artificial Sequence
  Description of Artificial Sequence: Target Sequence/siNA antisense region
cuauggcucucccgggagg

SEQ ID NO: 787 - RNA, 19 nt, Artificial Sequence
  Description of Artificial Sequence: Target Sequence/siNA antisense region
acuauggcucucccgggag

SEQ ID NO: 788 - RNA, 19 nt, Artificial Sequence
  Description of Artificial Sequence: Target Sequence/siNA antisense region
gggccccugcgcggcaaca

SEQ ID NO: 789 - RNA, 19 nt, Artificial Sequence
  Description of Artificial Sequence: Target Sequence/siNA antisense region
gcucucccgggaggggggg

SEQ ID NO: 790 - RNA, 19 nt, Artificial Sequence
  Description of Artificial Sequence: Target Sequence/siNA antisense region
cacucauacuaacgccaug

SEQ ID NO: 791 - RNA, 19 nt, Artificial Sequence
  Description of Artificial Sequence: Target Sequence/siNA antisense region
cauacuaacgccauggcua

SEQ ID NO: 792 - RNA, 19 nt, Artificial Sequence
  Description of Artificial Sequence: Target Sequence/siNA antisense region
ucauacuaacgccauggcu

SEQ ID NO: 793 - RNA, 19 nt, Artificial Sequence
  Description of Artificial Sequence: Target Sequence/siNA antisense region
acucauacuaacgccaugg

SEQ ID NO: 794 - RNA, 19 nt, Artificial Sequence
  Description of Artificial Sequence: Target Sequence/siNA antisense region
acacucauacuaacgccau

SEQ ID NO: 795 - RNA, 19 nt, Artificial Sequence
  Description of Artificial Sequence: Target Sequence/siNA antisense region
acgccauggcuagacgcuu

SEQ ID NO: 796 - RNA, 19 nt, Artificial Sequence
  Description of Artificial Sequence: Target Sequence/siNA antisense region
acuaacgccauggcuagac

SEQ ID NO: 797 - RNA, 19 nt, Artificial Sequence
  Description of Artificial Sequence: Target Sequence/siNA antisense region
cgccauggcuagacgcuuu

SEQ ID NO: 798 - RNA, 19 nt, Artificial Sequence
  Description of Artificial Sequence: Target Sequence/siNA antisense region
uaacgccauggcuagacgc

SEQ ID NO: 799 - RNA, 19 nt, Artificial Sequence
  Description of Artificial Sequence: Target Sequence/siNA antisense region
cucauacuaacgccauggc

SEQ ID NO: 800 - RNA, 19 nt, Artificial Sequence
  Description of Artificial Sequence: Target Sequence/siNA antisense region
aacgccauggcuagacgcu

SEQ ID NO: 801 - RNA, 19 nt, Artificial Sequence
  Description of Artificial Sequence: Target Sequence/siNA antisense region
cuaacgccauggcuagacg

SEQ ID NO: 802 - RNA, 19 nt, Artificial Sequence
  Description of Artificial Sequence: Target Sequence/siNA antisense region
uacuaacgccauggcuaga

SEQ ID NO: 803 - RNA, 19 nt, Artificial Sequence
  Description of Artificial Sequence: Target Sequence/siNA antisense region
gccauggcuagacgcuuuc

SEQ ID NO: 804 - RNA, 19 nt, Artificial Sequence
  Description of Artificial Sequence: Target Sequence/siNA antisense region
auacuaacgccauggcuag

SEQ ID NO: 805 - RNA, 19 nt, Artificial Sequence
  Description of Artificial Sequence: Target Sequence/siNA antisense region
aguuccucacaggggagug

SEQ ID NO: 806 - RNA, 19 nt, Artificial Sequence
  Description of Artificial Sequence: Target Sequence/siNA antisense region
uuugguuuuucuuugaggu

SEQ ID NO: 807 - RNA, 19 nt, Artificial Sequence
  Description of Artificial Sequence: Target Sequence/siNA antisense region
uggcuagacgcuuucugcg

SEQ ID NO: 808 - RNA, 19 nt, Artificial Sequence
  Description of Artificial Sequence: Target Sequence/siNA antisense region
gguaucgaugaccuuaccc

SEQ ID NO: 809 - RNA, 19 nt, Artificial Sequence
  Description of Artificial Sequence: Target Sequence/siNA antisense region
cauggcuagacgcuuucug

SEQ ID NO: 810 - RNA, 19 nt, Artificial Sequence
  Description of Artificial Sequence: Target Sequence/siNA antisense region
ugguuuuucuuugagguuu

SEQ ID NO: 811 - RNA, 19 nt, Artificial Sequence
  Description of Artificial Sequence: Target Sequence/siNA antisense region
auggcuagacgcuuucugc

SEQ ID NO: 812 - RNA, 19 nt, Artificial Sequence
  Description of Artificial Sequence: Target Sequence/siNA antisense region
ccauggcuagacgcuuucu

SEQ ID NO: 813 - RNA, 19 nt, Artificial Sequence
  Description of Artificial Sequence: Target Sequence/siNA antisense region
ggcuagacgcuuucugcgu

SEQ ID NO: 814 - RNA, 19 nt, Artificial Sequence
  Description of Artificial Sequence: Target Sequence/siNA antisense region
uugguuuuucuuugagguu

SEQ ID NO: 815 - RNA, 19 nt, Artificial Sequence
  Description of Artificial Sequence: Target Sequence/siNA antisense region
guaucgaugaccuuaccca

SEQ ID NO: 816 - RNA, 19 nt, Artificial Sequence
  Description of Artificial Sequence: Target Sequence/siNA antisense region
aggguaucgaugaccuuac

SEQ ID NO: 817 - RNA, 19 nt, Artificial Sequence
  Description of Artificial Sequence: Target Sequence/siNA antisense region
uagacgcuuucugcgugaa

SEQ ID NO: 818 - RNA, 19 nt, Artificial Sequence
  Description of Artificial Sequence: Target Sequence/siNA antisense region
ggguaucgaugaccuuacc

SEQ ID NO: 819 - RNA, 19 nt, Artificial Sequence
  Description of Artificial Sequence: Target Sequence/siNA antisense region
uuccucacaggggagugau

SEQ ID NO: 820 - RNA, 19 nt, Artificial Sequence
  Description of Artificial Sequence: Target Sequence/siNA antisense region
guuccucacaggggaguga

SEQ ID NO: 821 - RNA, 19 nt, Artificial Sequence
  Description of Artificial Sequence: Target Sequence/siNA antisense region
cgcuuucugcgugaagaca

SEQ ID NO: 822 - RNA, 19 nt, Artificial Sequence
  Description of Artificial Sequence: Target Sequence/siNA antisense region
cuagacgcuuucugcguga

SEQ ID NO: 823 - RNA, 19 nt, Artificial Sequence
  Description of Artificial Sequence: Target Sequence/siNA antisense region
gcuagacgcuuucugcgug

SEQ ID NO: 824 - RNA, 19 nt, Artificial Sequence
  Description of Artificial Sequence: Target Sequence/siNA antisense region
uccaagaaaggacccgguc

SEQ ID NO: 825 - RNA, 19 nt, Artificial Sequence
  Description of Artificial Sequence: Target Sequence/siNA antisense region
gugaagacaguaguuccuc

SEQ ID NO: 826 - RNA, 19 nt, Artificial Sequence
  Description of Artificial Sequence: Target Sequence/siNA antisense region
agacaguaguuccucacag

SEQ ID NO: 827 - RNA, 19 nt, Artificial Sequence
  Description of Artificial Sequence: Target Sequence/siNA antisense region
gcgugaagacaguaguucc

SEQ ID NO: 828 - RNA, 19 nt, Artificial Sequence
  Description of Artificial Sequence: Target Sequence/siNA antisense region
uaguuccucacaggggagu

SEQ ID NO: 829 - RNA, 19 nt, Artificial Sequence
  Description of Artificial Sequence: Target Sequence/siNA antisense region
acgcuuucugcgugaagac

SEQ ID NO: 830 - RNA, 19 nt, Artificial Sequence
  Description of Artificial Sequence: Target Sequence/siNA antisense region
cgugaagacaguaguuccu

SEQ ID NO: 831 - RNA, 19 nt, Artificial Sequence
  Description of Artificial Sequence: Target Sequence/siNA antisense region
gacaguaguuccucacagg

SEQ ID NO: 832 - RNA, 19 nt, Artificial Sequence
  Description of Artificial Sequence: Target Sequence/siNA antisense region
aagacaguaguuccucaca

SEQ ID NO: 833 - RNA, 19 nt, Artificial Sequence
  Description of Artificial Sequence: Target Sequence/siNA antisense region
gacgcuuucugcgugaaga

SEQ ID NO: 834 - RNA, 19 nt, Artificial Sequence
  Description of Artificial Sequence: Target Sequence/siNA antisense region
ugcgugaagacaguaguuc

SEQ ID NO: 835 - RNA, 19 nt, Artificial Sequence
  Description of Artificial Sequence: Target Sequence/siNA antisense region
acaguaguuccucacaggg

SEQ ID NO: 836 - RNA, 19 nt, Artificial Sequence
  Description of Artificial Sequence: Target Sequence/siNA antisense region
agacgcuuucugcgugaag

SEQ ID NO: 837 - RNA, 19 nt, Artificial Sequence
  Description of Artificial Sequence: Target Sequence/siNA antisense region
ugaagacaguaguuccuca

SEQ ID NO: 838 - RNA, 19 nt, Artificial Sequence
  Description of Artificial Sequence: Target Sequence/siNA antisense region
gacacucauacuaacgcca

SEQ ID NO: 839 - RNA, 19 nt, Artificial Sequence
  Description of Artificial Sequence: Target Sequence/siNA antisense region
caguaguuccucacagggg

SEQ ID NO: 840 - RNA, 19 nt, Artificial Sequence
  Description of Artificial Sequence: Target Sequence/siNA antisense region
gaagacaguaguuccucac

SEQ ID NO: 841 - RNA, 19 nt, Artificial Sequence
  Description of Artificial Sequence: Target Sequence/siNA antisense region
cgacacucauacuaacgcc

SEQ ID NO: 842 - RNA, 19 nt, Artificial Sequence
  Description of Artificial Sequence: Target Sequence/siNA antisense region
cgacccaacacuacucggc

SEQ ID NO: 843 - RNA, 19 nt, Artificial Sequence
  Description of Artificial Sequence: Target Sequence/siNA antisense region
cuuucugcgugaagacagu

SEQ ID NO: 844 - RNA, 19 nt, Artificial Sequence
  Description of Artificial Sequence: Target Sequence/siNA antisense region
caaggccuuucgcgaccca

SEQ ID NO: 845 - RNA, 19 nt, Artificial Sequence
  Description of Artificial Sequence: Target Sequence/siNA antisense region
uucugcgugaagacaguag

SEQ ID NO: 846 - RNA, 19 nt, Artificial Sequence
  Description of Artificial Sequence: Target Sequence/siNA antisense region
cgcgacccaacacuacucg

SEQ ID NO: 847 - RNA, 19 nt, Artificial Sequence
  Description of Artificial Sequence: Target Sequence/siNA antisense region
uuucgcgacccaacacuac

SEQ ID NO: 848 - RNA, 19 nt, Artificial Sequence
  Description of Artificial Sequence: Target Sequence/siNA antisense region
gguuuuucuuugagguuua

SEQ ID NO: 849 - RNA, 19 nt, Artificial Sequence
  Description of Artificial Sequence: Target Sequence/siNA antisense region
gcgacccaacacuacucgg

SEQ ID NO: 850 - RNA, 19 nt, Artificial Sequence
  Description of Artificial Sequence: Target Sequence/siNA antisense region
gacccaacacuacucggcu

SEQ ID NO: 851 - RNA, 19 nt, Artificial Sequence
  Description of Artificial Sequence: Target Sequence/siNA antisense region
ccacaaggccuuucgcgac

SEQ ID NO: 852 - RNA, 19 nt, Artificial Sequence
  Description of Artificial Sequence: Target Sequence/siNA antisense region
cuuucgcgacccaacacua

SEQ ID NO: 853 - RNA, 19 nt, Artificial Sequence
  Description of Artificial Sequence: Target Sequence/siNA antisense region
cccaacacuacucggcuag

SEQ ID NO: 854 - RNA, 19 nt, Artificial Sequence
  Description of Artificial Sequence: Target Sequence/siNA antisense region
ucgcgacccaacacuacuc

SEQ ID NO: 855 - RNA, 19 nt, Artificial Sequence
  Description of Artificial Sequence: Target Sequence/siNA antisense region
accacaaggccuuucgcga

SEQ ID NO: 856 - RNA, 19 nt, Artificial Sequence
  Description of Artificial Sequence: Target Sequence/siNA antisense region
acgacacucauacuaacgc

SEQ ID NO: 857 - RNA, 19 nt, Artificial Sequence
  Description of Artificial Sequence: Target Sequence/siNA antisense region
acccaacacuacucggcua

SEQ ID NO: 858 - RNA, 19 nt, Artificial Sequence
  Description of Artificial Sequence: Target Sequence/siNA antisense region
cugcgugaagacaguaguu

SEQ ID NO: 859 - RNA, 19 nt, Artificial Sequence
  Description of Artificial Sequence: Target Sequence/siNA antisense region
uaccacaaggccuuucgcg

SEQ ID NO: 860 - RNA, 19 nt, Artificial Sequence
  Description of Artificial Sequence: Target Sequence/siNA antisense region
ccuuucgcgacccaacacu

SEQ ID NO: 861 - RNA, 19 nt, Artificial Sequence
  Description of Artificial Sequence: Target Sequence/siNA antisense region
aggccuuucgcgacccaac

SEQ ID NO: 862 - RNA, 19 nt, Artificial Sequence
  Description of Artificial Sequence: Target Sequence/siNA antisense region
uucgcgacccaacacuacu

SEQ ID NO: 863 - RNA, 19 nt, Artificial Sequence
  Description of Artificial Sequence: Target Sequence/siNA antisense region
aaggccuuucgcgacccaa

SEQ ID NO: 864 - RNA, 19 nt, Artificial Sequence
  Description of Artificial Sequence: Target Sequence/siNA antisense region
aguaguuccucacagggga

SEQ ID NO: 865 - RNA, 19 nt, Artificial Sequence
  Description of Artificial Sequence: Target Sequence/siNA antisense region
uuucugcgugaagacagua

SEQ ID NO: 866 - RNA, 19 nt, Artificial Sequence
  Description of Artificial Sequence: Target Sequence/siNA antisense region
gccuuucgcgacccaacac

SEQ ID NO: 867 - RNA, 19 nt, Artificial Sequence
  Description of Artificial Sequence: Target Sequence/siNA antisense region
ucugcgugaagacaguagu

SEQ ID NO: 868 - RNA, 19 nt, Artificial Sequence
  Description of Artificial Sequence: Target Sequence/siNA antisense region
gcuuucugcgugaagacag

SEQ ID NO: 869 - RNA, 19 nt, Artificial Sequence
  Description of Artificial Sequence: Target Sequence/siNA antisense region
acaaggccuuucgcgaccc

SEQ ID NO: 870 - RNA, 19 nt, Artificial Sequence
  Description of Artificial Sequence: Target Sequence/siNA antisense region
uuuuucuuugagguuuagg

SEQ ID NO: 871 - RNA, 19 nt, Artificial Sequence
  Description of Artificial Sequence: Target Sequence/siNA antisense region
cacaaggccuuucgcgacc

SEQ ID NO: 872 - RNA, 19 nt, Artificial Sequence
  Description of Artificial Sequence: Target Sequence/siNA antisense region
guuuuucuuugagguuuag

SEQ ID NO: 873 - RNA, 19 nt, Artificial Sequence
  Description of Artificial Sequence: Target Sequence/siNA antisense region
ggccuuucgcgacccaaca

SEQ ID NO: 874 - RNA, 19 nt, Artificial Sequence
  Description of Artificial Sequence: Target Sequence/siNA antisense region
guaguuccucacaggggag

SEQ ID NO: 875 - RNA, 19 nt, Artificial Sequence
  Description of Artificial Sequence: Target Sequence/siNA antisense region
uuuucuuugagguuuagga

SEQ ID NO: 876 - RNA, 19 nt, Artificial Sequence
  Description of Artificial Sequence: Target Sequence/siNA antisense region
auccaagaaaggacccggu

SEQ ID NO: 877 - RNA, 19 nt, Artificial Sequence
  Description of Artificial Sequence: Target Sequence/siNA antisense region
uucuuugagguuuaggauu

SEQ ID NO: 878 - RNA, 19 nt, Artificial Sequence
  Description of Artificial Sequence: Target Sequence/siNA antisense region
ccaaaucuccaggcauuga

SEQ ID NO: 879 - RNA, 19 nt, Artificial Sequence
  Description of Artificial Sequence: Target Sequence/siNA antisense region
cgcccaaaucuccaggcau

SEQ ID NO: 880 - RNA, 19 nt, Artificial Sequence
  Description of Artificial Sequence: Target Sequence/siNA antisense region
gcccaaaucuccaggcauu

SEQ ID NO: 881 - RNA, 19 nt, Artificial Sequence
  Description of Artificial Sequence: Target Sequence/siNA antisense region
auguaccccaugaggucgg

SEQ ID NO: 882 - RNA, 19 nt, Artificial Sequence
  Description of Artificial Sequence: Target Sequence/siNA antisense region
aaaucuccaggcauugagc

SEQ ID NO: 883 - RNA, 19 nt, Artificial Sequence
  Description of Artificial Sequence: Target Sequence/siNA antisense region
caaaucuccaggcauugag

SEQ ID NO: 884 - RNA, 19 nt, Artificial Sequence
  Description of Artificial Sequence: Target Sequence/siNA antisense region
ccaacacuacucggcuagc

SEQ ID NO: 885 - RNA, 19 nt, Artificial Sequence
  Description of Artificial Sequence: Target Sequence/siNA antisense region
aaucuccaggcauugagcg

SEQ ID NO: 886 - RNA, 19 nt, Artificial Sequence
  Description of Artificial Sequence: Target Sequence/siNA antisense region
cccaaaucuccaggcauug

SEQ ID NO: 887 - RNA, 19 nt, Artificial Sequence
  Description of Artificial Sequence: Target Sequence/siNA antisense region
uguaccccaugaggucggc

SEQ ID NO: 888 - RNA, 19 nt, Artificial Sequence
  Description of Artificial Sequence: Target Sequence/siNA antisense region
uuucuuugagguuuaggau

SEQ ID NO: 889 - RNA, 19 nt, Artificial Sequence
  Description of Artificial Sequence: Target Sequence/siNA antisense region
cgggggcacgcccaaaucu

SEQ ID NO: 890 - RNA, 19 nt, Artificial Sequence
  Description of Artificial Sequence: Target Sequence/siNA antisense region
ucuccaggcauugagcggg

SEQ ID NO: 891 - RNA, 19 nt, Artificial Sequence
  Description of Artificial Sequence: Target Sequence/siNA antisense region
gggggcacgcccaaaucuc

SEQ ID NO: 892 - RNA, 19 nt, Artificial Sequence
  Description of Artificial Sequence: Target Sequence/siNA antisense region
ggggcacgcccaaaucucc

SEQ ID NO: 893 - RNA, 19 nt, Artificial Sequence
  Description of Artificial Sequence: Target Sequence/siNA antisense region
gcgggggcacgcccaaauc

SEQ ID NO: 894 - RNA, 19 nt, Artificial Sequence
  Description of Artificial Sequence: Target Sequence/siNA antisense region
aucuccaggcauugagcgg

SEQ ID NO: 895 - RNA, 19 nt, Artificial Sequence
  Description of Artificial Sequence: Target Sequence/siNA antisense region
cuggcaauuccgguguacu

SEQ ID NO: 896 - RNA, 19 nt, Artificial Sequence
  Description of Artificial Sequence: Target Sequence/siNA antisense region
uccuggcaauuccggugua

SEQ ID NO: 897 - RNA, 19 nt, Artificial Sequence
  Description of Artificial Sequence: Target Sequence/siNA antisense region
uggcaauuccgguguacuc

SEQ ID NO: 898 - RNA, 19 nt, Artificial Sequence
  Description of Artificial Sequence: Target Sequence/siNA antisense region
ccuggcaauuccgguguac

SEQ ID NO: 899 - RNA, 19 nt, Artificial Sequence
  Description of Artificial Sequence: Target Sequence/siNA antisense region
uggggccccugcgcggcaa

SEQ ID NO: 900 - RNA, 19 nt, Artificial Sequence
  Description of Artificial Sequence: Target Sequence/siNA antisense region
ggcacgcccaaaucuccag

SEQ ID NO: 901 - RNA, 19 nt, Artificial Sequence
  Description of Artificial Sequence: Target Sequence/siNA antisense region
ggggccccugcgcggcaac

SEQ ID NO: 902 - RNA, 19 nt, Artificial Sequence
  Description of Artificial Sequence: Target Sequence/siNA antisense region
cacgcccaaaucuccaggc

SEQ ID NO: 903 - RNA, 19 nt, Artificial Sequence
  Description of Artificial Sequence: Target Sequence/siNA antisense region
gggcacgcccaaaucucca

SEQ ID NO: 904 - RNA, 19 nt, Artificial Sequence
  Description of Artificial Sequence: Target Sequence/siNA antisense region
gcacgcccaaaucuccagg

SEQ ID NO: 905 - RNA, 19 nt, Artificial Sequence
  Description of Artificial Sequence: Target Sequence/siNA antisense region
caacacuacucggcuagca

SEQ ID NO: 906 - RNA, 19 nt, Artificial Sequence
  Description of Artificial Sequence: Target Sequence/siNA antisense region
acgcccaaaucuccaggca

SEQ ID NO: 907 - RNA, 19 nt, Artificial Sequence
  Description of Artificial Sequence: Target Sequence/siNA antisense region
aacacuacucggcuagcag

SEQ ID NO: 908 - RNA, 19 nt, Artificial Sequence
  Description of Artificial Sequence: Target Sequence/siNA antisense region
acacuacucggcuagcagu

SEQ ID NO: 909 - RNA, 19 nt, Artificial Sequence
  Description of Artificial Sequence: Target Sequence/siNA antisense region
cacuacucggcuagcaguc

SEQ ID NO: 910 - RNA, 19 nt, Artificial Sequence
  Description of Artificial Sequence: Target Sequence/siNA antisense region
acuacucggcuagcagucu

SEQ ID NO: 911 - RNA, 19 nt, Artificial Sequence
  Description of Artificial Sequence: Target Sequence/siNA antisense region
cuccaggcauugagcgggu

SEQ ID NO: 912 - RNA, 19 nt, Artificial Sequence
  Description of Artificial Sequence: Target Sequence/siNA antisense region
uccaggcauugagcggguu

SEQ ID NO: 913 - RNA, 19 nt, Artificial Sequence
  Description of Artificial Sequence: Target Sequence/siNA antisense region
cuggggccccugcgcggca

SEQ ID NO: 914 - RNA, 19 nt, Artificial Sequence
  Description of Artificial Sequence: Target Sequence/siNA antisense region
cacccaaccuggggccccu

SEQ ID NO: 915 - RNA, 19 nt, Artificial Sequence
  Description of Artificial Sequence: Target Sequence/siNA antisense region
cacacccaaccuggggccc

SEQ ID NO: 916 - RNA, 19 nt, Artificial Sequence
  Description of Artificial Sequence: Target Sequence/siNA antisense region
acccaaccuggggccccug

SEQ ID NO: 917 - RNA, 19 nt, Artificial Sequence
  Description of Artificial Sequence: Target Sequence/siNA antisense region
gcacacccaaccuggggcc

SEQ ID NO: 918 - RNA, 19 nt, Artificial Sequence
  Description of Artificial Sequence: Target Sequence/siNA antisense region
ccaaccuggggccccugcg

SEQ ID NO: 919 - RNA, 19 nt, Artificial Sequence
  Description of Artificial Sequence: Target Sequence/siNA antisense region
acaggagccauccugccca

SEQ ID NO: 920 - RNA, 19 nt, Artificial Sequence
  Description of Artificial Sequence: Target Sequence/siNA antisense region
cgcacacccaaccuggggc

SEQ ID NO: 921 - RNA, 19 nt, Artificial Sequence
  Description of Artificial Sequence: Target Sequence/siNA antisense region
cccaaccuggggccccugc

SEQ ID NO: 922 - RNA, 19 nt, Artificial Sequence
  Description of Artificial Sequence: Target Sequence/siNA antisense region
gacaggagccauccugccc

SEQ ID NO: 923 - RNA, 19 nt, Artificial Sequence
  Description of Artificial Sequence: Target Sequence/siNA antisense region
acacccaaccuggggcccc

SEQ ID NO: 924 - RNA, 19 nt, Artificial Sequence
  Description of Artificial Sequence: Target Sequence/siNA antisense region
ccuggggccccugcgcggc

SEQ ID NO: 925 - RNA, 19 nt, Artificial Sequence
  Description of Artificial Sequence: Target Sequence/siNA antisense region
caaccuggggccccugcgc

SEQ ID NO: 926 - RNA, 19 nt, Artificial Sequence
  Description of Artificial Sequence: Target Sequence/siNA antisense region
aaccuggggccccugcgcg

SEQ ID NO: 927 - RNA, 19 nt, Artificial Sequence
  Description of Artificial Sequence: Target Sequence/siNA antisense region
accuggggccccugcgcgg

SEQ ID NO: 928 - RNA, 19 nt, Artificial Sequence
  Description of Artificial Sequence: Target Sequence/siNA antisense region
gaaaggacccggucguccu

SEQ ID NO: 929 - RNA, 19 nt, Artificial Sequence
  Description of Artificial Sequence: Target Sequence/siNA antisense region
aaaggacccggucguccug

SEQ ID NO: 930 - RNA, 19 nt, Artificial Sequence
  Description of Artificial Sequence: Target Sequence/siNA antisense region
ggacccggucguccuggca

SEQ ID NO: 931 - RNA, 19 nt, Artificial Sequence
  Description of Artificial Sequence: Target Sequence/siNA antisense region
acccggucguccuggcaau

SEQ ID NO: 932 - RNA, 19 nt, Artificial Sequence
  Description of Artificial Sequence: Target Sequence/siNA antisense region
cccggucguccuggcaauu

SEQ ID NO: 933 - RNA, 19 nt, Artificial Sequence
  Description of Artificial Sequence: Target Sequence/siNA antisense region
gacccggucguccuggcaa

SEQ ID NO: 934 - RNA, 19 nt, Artificial Sequence
  Description of Artificial Sequence: Target Sequence/siNA antisense region
aaggacccggucguccugg

SEQ ID NO: 935 - RNA, 19 nt, Artificial Sequence
  Description of Artificial Sequence: Target Sequence/siNA antisense region
aggacccggucguccuggc

SEQ ID NO: 936 - RNA, 19 nt, Artificial Sequence
  Description of Artificial Sequence: Target Sequence/siNA antisense region
ccggucguccuggcaauuc

SEQ ID NO: 937 - RNA, 19 nt, Artificial Sequence
  Description of Artificial Sequence: Target Sequence/siNA antisense region
caagaaaggacccggucgu

SEQ ID NO: 938 - RNA, 19 nt, Artificial Sequence
  Description of Artificial Sequence: Target Sequence/siNA antisense region
aagaaaggacccggucguc

SEQ ID NO: 939 - RNA, 19 nt, Artificial Sequence
  Description of Artificial Sequence: Target Sequence/siNA antisense region
ccaagaaaggacccggucg

SEQ ID NO: 940 - RNA, 19 nt, Artificial Sequence
  Description of Artificial Sequence: Target Sequence/siNA antisense region
agaaaggacccggucgucc

SEQ ID NO: 941 - RNA, 19 nt, Artificial Sequence
  Description of Artificial Sequence: Target Sequence/siNA antisense region
gucguccuggcaauuccgg

SEQ ID NO: 942 - RNA, 19 nt, Artificial Sequence
  Description of Artificial Sequence: Target Sequence/siNA antisense region
guccuggcaauuccggugu

SEQ ID NO: 943 - RNA, 19 nt, Artificial Sequence
  Description of Artificial Sequence: Target Sequence/siNA antisense region
ucguccuggcaauuccggu

SEQ ID NO: 944 - RNA, 19 nt, Artificial Sequence
  Description of Artificial Sequence: Target Sequence/siNA antisense region
ggucguccuggcaauuccg

SEQ ID NO: 945 - RNA, 19 nt, Artificial Sequence
  Description of Artificial Sequence: Target Sequence/siNA antisense region
cggucguccuggcaauucc

SEQ ID NO: 946 - RNA, 19 nt, Artificial Sequence
  Description of Artificial Sequence: Target Sequence/siNA antisense region
cguccuggcaauuccggug

SEQ ID NO: 947 - RNA, 19 nt, Artificial Sequence
  Description of Artificial Sequence: Target Sequence/siNA antisense region
gcgcacacccaaccugggg

SEQ ID NO: 948 - RNA, 19 nt, Artificial Sequence
  Description of Artificial Sequence: Target Sequence/siNA antisense region
guaaacuccaccaacgauc

SEQ ID NO: 949 - RNA, 19 nt, Artificial Sequence
  Description of Artificial Sequence: Target Sequence/siNA antisense region
aaacuccaccaacgaucug

SEQ ID NO: 950 - RNA, 19 nt, Artificial Sequence
  Description of Artificial Sequence: Target Sequence/siNA antisense region
uaaacuccaccaacgaucu

SEQ ID NO: 951 - RNA, 19 nt, Artificial Sequence
  Description of Artificial Sequence: Target Sequence/siNA antisense region
cgcgcacacccaaccuggg

SEQ ID NO: 952 - RNA, 19 nt, Artificial Sequence
  Description of Artificial Sequence: Target Sequence/siNA antisense region
gcgcgcacacccaaccugg

SEQ ID NO: 953 - RNA, 19 nt, Artificial Sequence
  Description of Artificial Sequence: Target Sequence/siNA antisense region
ucgcgcgcacacccaaccu

SEQ ID NO: 954 - RNA, 19 nt, Artificial Sequence
  Description of Artificial Sequence: Target Sequence/siNA antisense region
cgcgcgcacacccaaccug

SEQ ID NO: 955 - RNA, 19 nt, Artificial Sequence
  Description of Artificial Sequence: Target Sequence/siNA antisense region
gucgcgcgcacacccaacc

SEQ ID NO: 956 - RNA, 19 nt, Artificial Sequence
  Description of Artificial Sequence: Target Sequence/siNA antisense region
guguuacguuugguuuuuc

SEQ ID NO: 957 - RNA, 19 nt, Artificial Sequence
  Description of Artificial Sequence: Target Sequence/siNA antisense region
uguuacguuugguuuuucu

SEQ ID NO: 958 - RNA, 19 nt, Artificial Sequence
  Description of Artificial Sequence: Target Sequence/siNA antisense region
guugguguuacguuugguu

SEQ ID NO: 959 - RNA, 19 nt, Artificial Sequence
  Description of Artificial Sequence: Target Sequence/siNA antisense region
uuacguuugguuuuucuuu

SEQ ID NO: 960 - RNA, 19 nt, Artificial Sequence
  Description of Artificial Sequence: Target Sequence/siNA antisense region
gguguuacguuugguuuuu

SEQ ID NO: 961 - RNA, 19 nt, Artificial Sequence
  Description of Artificial Sequence: Target Sequence/siNA antisense region
guuacguuugguuuuucuu

SEQ ID NO: 962 - RNA, 19 nt, Artificial Sequence
  Description of Artificial Sequence: Target Sequence/siNA antisense region
uacguuugguuuuucuuug

SEQ ID NO: 963 - RNA, 19 nt, Artificial Sequence
  Description of Artificial Sequence: Target Sequence/siNA antisense region
cgcgaccuacgccgggggu

SEQ ID NO: 964 - RNA, 19 nt, Artificial Sequence
  Description of Artificial Sequence: Target Sequence/siNA antisense region
gcgaccuacgccggggguc

SEQ ID NO: 965 - RNA, 19 nt, Artificial Sequence
  Description of Artificial Sequence: Target Sequence/siNA antisense region
cacgacacucauacuaacg

SEQ ID NO: 966 - RNA, 19 nt, Artificial Sequence
  Description of Artificial Sequence: Target Sequence/siNA antisense region
gcacgacacucauacuaac

SEQ ID NO: 967 - RNA, 19 nt, Artificial Sequence
  Description of Artificial Sequence: Target Sequence/siNA antisense region
ugcacgacacucauacuaa

SEQ ID NO: 968 - RNA, 19 nt, Artificial Sequence
  Description of Artificial Sequence: Target Sequence/siNA antisense region
cgguugguguuacguuugg

SEQ ID NO: 969 - RNA, 19 nt, Artificial Sequence
  Description of Artificial Sequence: Target Sequence/siNA antisense region
gguugguguuacguuuggu

SEQ ID NO: 970 - RNA, 19 nt, Artificial Sequence
  Description of Artificial Sequence: Target Sequence/siNA antisense region
cucgcgggggcacgcccaa

SEQ ID NO: 971 - RNA, 19 nt, Artificial Sequence
  Description of Artificial Sequence: Target Sequence/siNA antisense region
cgcgggggcacgcccaaau

SEQ ID NO: 972 - RNA, 19 nt, Artificial Sequence
  Description of Artificial Sequence: Target Sequence/siNA antisense region
ucgcgggggcacgcccaaa

SEQ ID NO: 973 - RNA, 19 nt, Artificial Sequence
  Description of Artificial Sequence: Target Sequence/siNA antisense region
uugguguuacguuugguuu

SEQ ID NO: 974 - RNA, 19 nt, Artificial Sequence
  Description of Artificial Sequence: Target Sequence/siNA antisense region
ucucgcgggggcacgccca

SEQ ID NO: 975 - RNA, 19 nt, Artificial Sequence
  Description of Artificial Sequence: Target Sequence/siNA antisense region
acuccaccaacgaucugac

SEQ ID NO: 976 - RNA, 19 nt, Artificial Sequence
  Description of Artificial Sequence: Target Sequence/siNA antisense region
ccuggaggcugcacgacac

SEQ ID NO: 977 - RNA, 19 nt, Artificial Sequence
  Description of Artificial Sequence: Target Sequence/siNA antisense region
cuccaccaacgaucugacc

SEQ ID NO: 978 - RNA, 19 nt, Artificial Sequence
  Description of Artificial Sequence: Target Sequence/siNA antisense region
cuggaggcugcacgacacu

SEQ ID NO: 979 - RNA, 19 nt, Artificial Sequence
  Description of Artificial Sequence: Target Sequence/siNA antisense region
uggaggcugcacgacacuc

SEQ ID NO: 980 - RNA, 19 nt, Artificial Sequence
  Description of Artificial Sequence: Target Sequence/siNA antisense region
cauggugcacggucuacga

SEQ ID NO: 981 - RNA, 19 nt, Artificial Sequence
  Description of Artificial Sequence: Target Sequence/siNA antisense region
gugcucauggugcacgguc

SEQ ID NO: 982 - RNA, 19 nt, Artificial Sequence
  Description of Artificial Sequence: Target Sequence/siNA antisense region
gcugcacgacacucauacu

SEQ ID NO: 983 - RNA, 19 nt, Artificial Sequence
  Description of Artificial Sequence: Target Sequence/siNA antisense region
cugcacgacacucauacua

SEQ ID NO: 984 - RNA, 19 nt, Artificial Sequence
  Description of Artificial Sequence: Target Sequence/siNA antisense region
aacuccaccaacgaucuga

SEQ ID NO: 985 - RNA, 19 nt, Artificial Sequence
  Description of Artificial Sequence: Target Sequence/siNA antisense region
ugcucauggugcacggucu

SEQ ID NO: 986 - RNA, 19 nt, Artificial Sequence
  Description of Artificial Sequence: Target Sequence/siNA antisense region
ugguguuacguuugguuuu

SEQ ID NO: 987 - RNA, 19 nt, Artificial Sequence
  Description of Artificial Sequence: Target Sequence/siNA antisense region
cucauggugcacggucuac

SEQ ID NO: 988 - RNA, 19 nt, Artificial Sequence
  Description of Artificial Sequence: Target Sequence/siNA antisense region
auggugcacggucuacgag

SEQ ID NO: 989 - RNA, 19 nt, Artificial Sequence
  Description of Artificial Sequence: Target Sequence/siNA antisense region
ucauggugcacggucuacg

SEQ ID NO: 990 - RNA, 19 nt, Artificial Sequence
  Description of Artificial Sequence: Target Sequence/siNA antisense region
uacccgggcugagcccagg

SEQ ID NO: 991 - RNA, 19 nt, Artificial Sequence
  Description of Artificial Sequence: Target Sequence/siNA antisense region
gcucauggugcacggucua

SEQ ID NO: 992 - RNA, 19 nt, Artificial Sequence
  Description of Artificial Sequence: Target Sequence/siNA antisense region
gugcacggucuacgagacc

SEQ ID NO: 993 - RNA, 19 nt, Artificial Sequence
  Description of Artificial Sequence: Target Sequence/siNA antisense region
uggugcacggucuacgaga

SEQ ID NO: 994 - RNA, 19 nt, Artificial Sequence
  Description of Artificial Sequence: Target Sequence/siNA antisense region
ggugcacggucuacgagac

SEQ ID NO: 995 - RNA, 19 nt, Artificial Sequence
  Description of Artificial Sequence: Target Sequence/siNA antisense region
uaucgaugaccuuacccaa

SEQ ID NO: 996 - RNA, 19 nt, Artificial Sequence
  Description of Artificial Sequence: Target Sequence/siNA antisense region
uaccccaugaggucggcga

SEQ ID NO: 997 - RNA, 19 nt, Artificial Sequence
  Description of Artificial Sequence: Target Sequence/siNA antisense region
guuugguuuuucuuugagg

SEQ ID NO: 998 - RNA, 19 nt, Artificial Sequence
  Description of Artificial Sequence: Target Sequence/siNA antisense region
gucucgcgggggcacgccc

SEQ ID NO: 999 - RNA, 19 nt, Artificial Sequence
  Description of Artificial Sequence: Target Sequence/siNA antisense region
gcuaucagccgguucaucc

SEQ ID NO: 1000 - RNA, 19 nt, Artificial Sequence
  Description of Artificial Sequence: Target Sequence/siNA antisense region
cuaucagccgguucaucca

SEQ ID NO: 1001 - RNA, 19 nt, Artificial Sequence
  Description of Artificial Sequence: Target Sequence/siNA antisense region
cguuugguuuuucuuugag

SEQ ID NO: 1002 - RNA, 19 nt, Artificial Sequence
  Description of Artificial Sequence: Target Sequence/siNA antisense region
accgcucggaagucuuccu

SEQ ID NO: 1003 - RNA, 19 nt, Artificial Sequence
  Description of Artificial Sequence: Target Sequence/siNA antisense region
acguuugguuuuucuuuga

SEQ ID NO: 1004 - RNA, 19 nt, Artificial Sequence
  Description of Artificial Sequence: Target Sequence/siNA antisense region
gaccgcucggaagucuucc

SEQ ID NO: 1005 - RNA, 19 nt, Artificial Sequence
  Description of Artificial Sequence: Target Sequence/siNA antisense region
guaccccaugaggucggcg

SEQ ID NO: 1006 - RNA, 19 nt, Artificial Sequence
  Description of Artificial Sequence: Target Sequence/siNA antisense region
gguugcgaccgcucggaag

SEQ ID NO: 1007 - RNA, 19 nt, Artificial Sequence
  Description of Artificial Sequence: Target Sequence/siNA antisense region
agucucgcgggggcacgcc

SEQ ID NO: 1008 - RNA, 19 nt, Artificial Sequence
  Description of Artificial Sequence: Target Sequence/siNA antisense region
aggcugcacgacacucaua

SEQ ID NO: 1009 - RNA, 19 nt, Artificial Sequence
  Description of Artificial Sequence: Target Sequence/siNA antisense region
uagcagucucgcgggggca

SEQ ID NO: 1010 - RNA, 19 nt, Artificial Sequence
  Description of Artificial Sequence: Target Sequence/siNA antisense region
uacucggcuagcagucucg

SEQ ID NO: 1011 - RNA, 19 nt, Artificial Sequence
  Description of Artificial Sequence: Target Sequence/siNA antisense region
ggaggcugcacgacacuca

SEQ ID NO: 1012 - RNA, 19 nt, Artificial Sequence
  Description of Artificial Sequence: Target Sequence/siNA antisense region
cuagcagucucgcgggggc

SEQ ID NO: 1013 - RNA, 19 nt, Artificial Sequence
  Description of Artificial Sequence: Target Sequence/siNA antisense region
cuacucggcuagcagucuc

SEQ ID NO: 1014 - RNA, 19 nt, Artificial Sequence
  Description of Artificial Sequence: Target Sequence/siNA antisense region
gcuagcagucucgcggggg

SEQ ID NO: 1015 - RNA, 19 nt, Artificial Sequence
  Description of Artificial Sequence: Target Sequence/siNA antisense region
cucggcuagcagucucgcg

SEQ ID NO: 1016 - RNA, 19 nt, Artificial Sequence
  Description of Artificial Sequence: Target Sequence/siNA antisense region
ggcugcacgacacucauac

SEQ ID NO: 1017 - RNA, 19 nt, Artificial Sequence
  Description of Artificial Sequence: Target Sequence/siNA antisense region
gaggcugcacgacacucau

SEQ ID NO: 1018 - RNA, 19 nt, Artificial Sequence
  Description of Artificial Sequence: Target Sequence/siNA antisense region
acucggcuagcagucucgc

SEQ ID NO: 1019 - RNA, 19 nt, Artificial Sequence
  Description of Artificial Sequence: Target Sequence/siNA antisense region
ggcuagcagucucgcgggg

SEQ ID NO: 1020 - RNA, 19 nt, Artificial Sequence
  Description of Artificial Sequence: Target Sequence/siNA antisense region
ucggcuagcagucucgcgg

SEQ ID NO: 1021 - RNA, 19 nt, Artificial Sequence
  Description of Artificial Sequence: Target Sequence/siNA antisense region
cggcuagcagucucgcggg

SEQ ID NO: 1022 - RNA, 19 nt, Artificial Sequence
  Description of Artificial Sequence: Target Sequence/siNA antisense region
cagucucgcgggggcacgc

SEQ ID NO: 1023 - RNA, 19 nt, Artificial Sequence
  Description of Artificial Sequence: Target Sequence/siNA antisense region
ucucccgggaggggggguc

SEQ ID NO: 1024 - RNA, 19 nt, Artificial Sequence
  Description of Artificial Sequence: Target Sequence/siNA antisense region
ugauccaagaaaggacccg

SEQ ID NO: 1025 - RNA, 19 nt, Artificial Sequence
  Description of Artificial Sequence: Target Sequence/siNA antisense region
agcagucucgcgggggcac

SEQ ID NO: 1026 - RNA, 19 nt, Artificial Sequence
  Description of Artificial Sequence: Target Sequence/siNA antisense region
gcagucucgcgggggcacg

SEQ ID NO: 1027 - RNA, 19 nt, Artificial Sequence
  Description of Artificial Sequence: Target Sequence/siNA antisense region
accccaugaggucggcgaa

SEQ ID NO: 1028 - RNA, 19 nt, Artificial Sequence
  Description of Artificial Sequence: Target Sequence/siNA antisense region
acuugacguccugugggcg

SEQ ID NO: 1029 - RNA, 19 nt, Artificial Sequence
  Description of Artificial Sequence: Target Sequence/siNA antisense region
aacuugacguccugugggc

SEQ ID NO: 1030 - RNA, 19 nt, Artificial Sequence
  Description of Artificial Sequence: Target Sequence/siNA antisense region
cucucccgggagggggggu

SEQ ID NO: 1031 - RNA, 19 nt, Artificial Sequence
  Description of Artificial Sequence: Target Sequence/siNA antisense region
cucccgggagggggggucc

SEQ ID NO: 1032 - RNA, 19 nt, Artificial Sequence
  Description of Artificial Sequence: Target Sequence/siNA antisense region
gauccaagaaaggacccgg

SEQ ID NO: 1033 - RNA, 19 nt, Artificial Sequence
  Description of Artificial Sequence: Target Sequence/siNA antisense region
cccgggaggggggguccug

SEQ ID NO: 1034 - RNA, 19 nt, Artificial Sequence
  Description of Artificial Sequence: Target Sequence/siNA antisense region
cccgggaacuugacguccu

SEQ ID NO: 1035 - RNA, 19 nt, Artificial Sequence
  Description of Artificial Sequence: Target Sequence/siNA antisense region
ucccgggaggggggguccu

SEQ ID NO: 1036 - RNA, 19 nt, Artificial Sequence
  Description of Artificial Sequence: Target Sequence/siNA antisense region
ggaacuugacguccugugg

SEQ ID NO: 1037 - RNA, 19 nt, Artificial Sequence
  Description of Artificial Sequence: Target Sequence/siNA antisense region
ccgggaacuugacguccug

SEQ ID NO: 1038 - RNA, 19 nt, Artificial Sequence
  Description of Artificial Sequence: Target Sequence/siNA antisense region
cgggaacuugacguccugu

SEQ ID NO: 1039 - RNA, 19 nt, Artificial Sequence
  Description of Artificial Sequence: Target Sequence/siNA antisense region
gggaacuugacguccugug

SEQ ID NO: 1040 - RNA, 19 nt, Artificial Sequence
  Description of Artificial Sequence: Target Sequence/siNA antisense region
ucagccgguucauccacug

SEQ ID NO: 1041 - RNA, 19 nt, Artificial Sequence
  Description of Artificial Sequence: Target Sequence/siNA antisense region
ggguacccgggcugagccc

SEQ ID NO: 1042 - RNA, 19 nt, Artificial Sequence
  Description of Artificial Sequence: Target Sequence/siNA antisense region
cgagguugcgaccgcucgg

SEQ ID NO: 1043 - RNA, 19 nt, Artificial Sequence
  Description of Artificial Sequence: Target Sequence/siNA antisense region
guacccgggcugagcccag

SEQ ID NO: 1044 - RNA, 19 nt, Artificial Sequence
  Description of Artificial Sequence: Target Sequence/siNA antisense region
aucagccgguucauccacu

SEQ ID NO: 1045 - RNA, 19 nt, Artificial Sequence
  Description of Artificial Sequence: Target Sequence/siNA antisense region
gagguugcgaccgcucgga

SEQ ID NO: 1046 - RNA, 19 nt, Artificial Sequence
  Description of Artificial Sequence: Target Sequence/siNA antisense region
gguacccgggcugagccca

SEQ ID NO: 1047 - RNA, 19 nt, Artificial Sequence
  Description of Artificial Sequence: Target Sequence/siNA antisense region
uagaggggccaaggguacc

SEQ ID NO: 1048 - RNA, 19 nt, Artificial Sequence
  Description of Artificial Sequence: Target Sequence/siNA antisense region
agguugcgaccgcucggaa

SEQ ID NO: 1049 - RNA, 19 nt, Artificial Sequence
  Description of Artificial Sequence: Target Sequence/siNA antisense region
agaggggccaaggguaccc

SEQ ID NO: 1050 - RNA, 19 nt, Artificial Sequence
  Description of Artificial Sequence: Target Sequence/siNA antisense region
uugauccaagaaaggaccc

SEQ ID NO: 1051 - RNA, 19 nt, Artificial Sequence
  Description of Artificial Sequence: Target Sequence/siNA antisense region
gaacuugacguccuguggg

SEQ ID NO: 1052 - RNA, 19 nt, Artificial Sequence
  Description of Artificial Sequence: Target Sequence/siNA antisense region
agauagagaaagagcaacc

SEQ ID NO: 1053 - RNA, 19 nt, Artificial Sequence
  Description of Artificial Sequence: Target Sequence/siNA antisense region
caggagccauccugcccac

SEQ ID NO: 1054 - RNA, 19 nt, Artificial Sequence
  Description of Artificial Sequence: Target Sequence/siNA antisense region
aggagccauccugcccacc

SEQ ID NO: 1055 - RNA, 19 nt, Artificial Sequence
  Description of Artificial Sequence: Target Sequence/siNA antisense region
aagauagagaaagagcaac

SEQ ID NO: 1056 - RNA, 19 nt, Artificial Sequence
  Description of Artificial Sequence: Target Sequence/siNA antisense region
uaucagccgguucauccac

SEQ ID NO: 1057 - RNA, 19 nt, Artificial Sequence
  Description of Artificial Sequence: Target Sequence/siNA antisense region
ccgggaggggggguccugg

SEQ ID NO: 1058 - RNA, 19 nt, Artificial Sequence
  Description of Artificial Sequence: Target Sequence/siNA antisense region
ggagccauccugcccaccc

SEQ ID NO: 1059 - RNA, 19 nt, Artificial Sequence
  Description of Artificial Sequence: Target Sequence/siNA antisense region
agucauagccuccgugaag

SEQ ID NO: 1060 - RNA, 19 nt, Artificial Sequence
  Description of Artificial Sequence: Target Sequence/siNA antisense region
acguccugugggcggcggu

SEQ ID NO: 1061 - RNA, 19 nt, Artificial Sequence
  Description of Artificial Sequence: Target Sequence/siNA antisense region
cgggaggggggguccugga

SEQ ID NO: 1062 - RNA, 19 nt, Artificial Sequence
  Description of Artificial Sequence: Target Sequence/siNA antisense region
gaccaguucaucaucauau

SEQ ID NO: 1063 - RNA, 19 nt, Artificial Sequence
  Description of Artificial Sequence: Target Sequence/siNA antisense region
uagucauagccuccgugaa

SEQ ID NO: 1064 - RNA, 19 nt, Artificial Sequence
  Description of Artificial Sequence: Target Sequence/siNA antisense region
cuagucauagccuccguga

SEQ ID NO: 1065 - RNA, 19 nt, Artificial Sequence
  Description of Artificial Sequence: Target Sequence/siNA antisense region
acgcuaucagccgguucau

SEQ ID NO: 1066 - RNA, 19 nt, Artificial Sequence
  Description of Artificial Sequence: Target Sequence/siNA antisense region
caguucaucaucauauccc

SEQ ID NO: 1067 - RNA, 19 nt, Artificial Sequence
  Description of Artificial Sequence: Target Sequence/siNA antisense region
agccgguucauccacugca

SEQ ID NO: 1068 - RNA, 19 nt, Artificial Sequence
  Description of Artificial Sequence: Target Sequence/siNA antisense region
gccgguucauccacugcac

SEQ ID NO: 1069 - RNA, 19 nt, Artificial Sequence
  Description of Artificial Sequence: Target Sequence/siNA antisense region
aacgcuaucagccgguuca

SEQ ID NO: 1070 - RNA, 19 nt, Artificial Sequence
  Description of Artificial Sequence: Target Sequence/siNA antisense region
ccaguucaucaucauaucc

SEQ ID NO: 1071 - RNA, 19 nt, Artificial Sequence
  Description of Artificial Sequence: Target Sequence/siNA antisense region
aggaagauagagaaagagc

SEQ ID NO: 1072 - RNA, 19 nt, Artificial Sequence
  Description of Artificial Sequence: Target Sequence/siNA antisense region
augguggagugucgccccc

SEQ ID NO: 1073 - RNA, 19 nt, Artificial Sequence
  Description of Artificial Sequence: Target Sequence/siNA antisense region
cgcuaucagccgguucauc

SEQ ID NO: 1074 - RNA, 19 nt, Artificial Sequence
  Description of Artificial Sequence: Target Sequence/siNA antisense region
accaguucaucaucauauc

SEQ ID NO: 1075 - RNA, 19 nt, Artificial Sequence
  Description of Artificial Sequence: Target Sequence/siNA antisense region
aguucaucaucauauccca

SEQ ID NO: 1076 - RNA, 19 nt, Artificial Sequence
  Description of Artificial Sequence: Target Sequence/siNA antisense region
gaagauagagaaagagcaa

SEQ ID NO: 1077 - RNA, 19 nt, Artificial Sequence
  Description of Artificial Sequence: Target Sequence/siNA antisense region
ugguggagugucgccccca

SEQ ID NO: 1078 - RNA, 19 nt, Artificial Sequence
  Description of Artificial Sequence: Target Sequence/siNA antisense region
ggaagauagagaaagagca

SEQ ID NO: 1079 - RNA, 19 nt, Artificial Sequence
  Description of Artificial Sequence: Target Sequence/siNA antisense region
guugauccaagaaaggacc

SEQ ID NO: 1080 - RNA, 19 nt, Artificial Sequence
  Description of Artificial Sequence: Target Sequence/siNA antisense region
gcgaccgcucggaagucuu

SEQ ID NO: 1081 - RNA, 19 nt, Artificial Sequence
  Description of Artificial Sequence: Target Sequence/siNA antisense region
ggccaaggguacccgggcu

SEQ ID NO: 1082 - RNA, 19 nt, Artificial Sequence
  Description of Artificial Sequence: Target Sequence/siNA antisense region
agcggguugauccaagaaa

SEQ ID NO: 1083 - RNA, 19 nt, Artificial Sequence
  Description of Artificial Sequence: Target Sequence/siNA antisense region
gccaaggguacccgggcug

SEQ ID NO: 1084 - RNA, 19 nt, Artificial Sequence
  Description of Artificial Sequence: Target Sequence/siNA antisense region
ugcgaccgcucggaagucu

SEQ ID NO: 1085 - RNA, 19 nt, Artificial Sequence
  Description of Artificial Sequence: Target Sequence/siNA antisense region
gagcggguugauccaagaa

SEQ ID NO: 1086 - RNA, 19 nt, Artificial Sequence
  Description of Artificial Sequence: Target Sequence/siNA antisense region
ggggccaaggguacccggg

SEQ ID NO: 1087 - RNA, 19 nt, Artificial Sequence
  Description of Artificial Sequence: Target Sequence/siNA antisense region
gguugauccaagaaaggac

SEQ ID NO: 1088 - RNA, 19 nt, Artificial Sequence
  Description of Artificial Sequence: Target Sequence/siNA antisense region
gcggguugauccaagaaag

SEQ ID NO: 1089 - RNA, 19 nt, Artificial Sequence
  Description of Artificial Sequence: Target Sequence/siNA antisense region
cggguugauccaagaaagg

SEQ ID NO: 1090 - RNA, 19 nt, Artificial Sequence
  Description of Artificial Sequence: Target Sequence/siNA antisense region
ggguugauccaagaaagga

SEQ ID NO: 1091 - RNA, 19 nt, Artificial Sequence
  Description of Artificial Sequence: Target Sequence/siNA antisense region
gaccaccgcccgggaacuu

SEQ ID NO: 1092 - RNA, 19 nt, Artificial Sequence
  Description of Artificial Sequence: Target Sequence/siNA antisense region
cagccgguucauccacugc

SEQ ID NO: 1093 - RNA, 19 nt, Artificial Sequence
  Description of Artificial Sequence: Target Sequence/siNA antisense region
aggggccaaggguacccgg

SEQ ID NO: 1094 - RNA, 19 nt, Artificial Sequence
  Description of Artificial Sequence: Target Sequence/siNA antisense region
ugaccaccgcccgggaacu

SEQ ID NO: 1095 - RNA, 19 nt, Artificial Sequence
  Description of Artificial Sequence: Target Sequence/siNA antisense region
uugagcggguugauccaag

SEQ ID NO: 1096 - RNA, 19 nt, Artificial Sequence
  Description of Artificial Sequence: Target Sequence/siNA antisense region
gcauugagcggguugaucc

SEQ ID NO: 1097 - RNA, 19 nt, Artificial Sequence
  Description of Artificial Sequence: Target Sequence/siNA antisense region
guugcgaccgcucggaagu

SEQ ID NO: 1098 - RNA, 19 nt, Artificial Sequence
  Description of Artificial Sequence: Target Sequence/siNA antisense region
ugagcggguugauccaaga

SEQ ID NO: 1099 - RNA, 19 nt, Artificial Sequence
  Description of Artificial Sequence: Target Sequence/siNA antisense region
auugagcggguugauccaa

SEQ ID NO: 1100 - RNA, 19 nt, Artificial Sequence
  Description of Artificial Sequence: Target Sequence/siNA antisense region
cguccugugggcggcgguu

SEQ ID NO: 1101 - RNA, 19 nt, Artificial Sequence
  Description of Artificial Sequence: Target Sequence/siNA antisense region
ccuguugcauaguucacgc

SEQ ID NO: 1102 - RNA, 19 nt, Artificial Sequence
  Description of Artificial Sequence: Target Sequence/siNA antisense region
aggcauugagcggguugau

SEQ ID NO: 1103 - RNA, 19 nt, Artificial Sequence
  Description of Artificial Sequence: Target Sequence/siNA antisense region
ggcauugagcggguugauc

SEQ ID NO: 1104 - RNA, 19 nt, Artificial Sequence
  Description of Artificial Sequence: Target Sequence/siNA antisense region
ccaggcauugagcggguug

SEQ ID NO: 1105 - RNA, 19 nt, Artificial Sequence
  Description of Artificial Sequence: Target Sequence/siNA antisense region
cccaugaggucggcgaagc

SEQ ID NO: 1106 - RNA, 19 nt, Artificial Sequence
  Description of Artificial Sequence: Target Sequence/siNA antisense region
uugcgaccgcucggaaguc

SEQ ID NO: 1107 - RNA, 19 nt, Artificial Sequence
  Description of Artificial Sequence: Target Sequence/siNA antisense region
caggcauugagcggguuga

SEQ ID NO: 1108 - RNA, 19 nt, Artificial Sequence
  Description of Artificial Sequence: Target Sequence/siNA antisense region
ccaugaggucggcgaagcc

SEQ ID NO: 1109 - RNA, 19 nt, Artificial Sequence
  Description of Artificial Sequence: Target Sequence/siNA antisense region
cauugagcggguugaucca

SEQ ID NO: 1110 - RNA, 19 nt, Artificial Sequence
  Description of Artificial Sequence: Target Sequence/siNA antisense region
acgaucugaccaccgcccg

SEQ ID NO: 1111 - RNA, 19 nt, Artificial Sequence
  Description of Artificial Sequence: Target Sequence/siNA antisense region
uugccauagaggggccaag

SEQ ID NO: 1112 - RNA, 19 nt, Artificial Sequence
  Description of Artificial Sequence: Target Sequence/siNA antisense region
cgaucugaccaccgcccgg

SEQ ID NO: 1113 - RNA, 19 nt, Artificial Sequence
  Description of Artificial Sequence: Target Sequence/siNA antisense region
agccauccugcccacccca

SEQ ID NO: 1114 - RNA, 19 nt, Artificial Sequence
  Description of Artificial Sequence: Target Sequence/siNA antisense region
gcggcaacagguaaacucc

SEQ ID NO: 1115 - RNA, 19 nt, Artificial Sequence
  Description of Artificial Sequence: Target Sequence/siNA antisense region
ugccauagaggggccaagg

SEQ ID NO: 1116 - RNA, 19 nt, Artificial Sequence
  Description of Artificial Sequence: Target Sequence/siNA antisense region
ggcaacagguaaacuccac

SEQ ID NO: 1117 - RNA, 19 nt, Artificial Sequence
  Description of Artificial Sequence: Target Sequence/siNA antisense region
gcaacagguaaacuccacc

SEQ ID NO: 1118 - RNA, 19 nt, Artificial Sequence
  Description of Artificial Sequence: Target Sequence/siNA antisense region
ucugaccaccgcccgggaa

SEQ ID NO: 1119 - RNA, 19 nt, Artificial Sequence
  Description of Artificial Sequence: Target Sequence/siNA antisense region
uucccuguugcauaguuca

SEQ ID NO: 1120 - RNA, 19 nt, Artificial Sequence
  Description of Artificial Sequence: Target Sequence/siNA antisense region
gcgcggcaacagguaaacu

SEQ ID NO: 1121 - RNA, 19 nt, Artificial Sequence
  Description of Artificial Sequence: Target Sequence/siNA antisense region
ucccuguugcauaguucac

SEQ ID NO: 1122 - RNA, 19 nt, Artificial Sequence
  Description of Artificial Sequence: Target Sequence/siNA antisense region
ccugcgcggcaacagguaa

SEQ ID NO: 1123 - RNA, 19 nt, Artificial Sequence
  Description of Artificial Sequence: Target Sequence/siNA antisense region
aucugaccaccgcccggga

SEQ ID NO: 1124 - RNA, 19 nt, Artificial Sequence
  Description of Artificial Sequence: Target Sequence/siNA antisense region
cugaccaccgcccgggaac

SEQ ID NO: 1125 - RNA, 19 nt, Artificial Sequence
  Description of Artificial Sequence: Target Sequence/siNA antisense region
gggccaaggguacccgggc

SEQ ID NO: 1126 - RNA, 19 nt, Artificial Sequence
  Description of Artificial Sequence: Target Sequence/siNA antisense region
ccuucgccuucaucuccuu

SEQ ID NO: 1127 - RNA, 19 nt, Artificial Sequence
  Description of Artificial Sequence: Target Sequence/siNA antisense region
gccuucgccuucaucuccu

SEQ ID NO: 1128 - RNA, 19 nt, Artificial Sequence
  Description of Artificial Sequence: Target Sequence/siNA antisense region
ugcgcggcaacagguaaac

SEQ ID NO: 1129 - RNA, 19 nt, Artificial Sequence
  Description of Artificial Sequence: Target Sequence/siNA antisense region
ggccccugcgcggcaacag

SEQ ID NO: 1130 - RNA, 19 nt, Artificial Sequence
  Description of Artificial Sequence: Target Sequence/siNA antisense region
gugggcggcgguugguguu

SEQ ID NO: 1131 - RNA, 19 nt, Artificial Sequence
  Description of Artificial Sequence: Target Sequence/siNA antisense region
cgcggcaacagguaaacuc

SEQ ID NO: 1132 - RNA, 19 nt, Artificial Sequence
  Description of Artificial Sequence: Target Sequence/siNA antisense region
cugcgcggcaacagguaaa

SEQ ID NO: 1133 - RNA, 19 nt, Artificial Sequence
  Description of Artificial Sequence: Target Sequence/siNA antisense region
gagccauccugcccacccc

SEQ ID NO: 1134 - RNA, 19 nt, Artificial Sequence
  Description of Artificial Sequence: Target Sequence/siNA antisense region
cgaccgcucggaagucuuc

SEQ ID NO: 1135 - RNA, 19 nt, Artificial Sequence
  Description of Artificial Sequence: Target Sequence/siNA antisense region
ccccugcgcggcaacaggu

SEQ ID NO: 1136 - RNA, 19 nt, Artificial Sequence
  Description of Artificial Sequence: Target Sequence/siNA antisense region
cccugcgcggcaacaggua

SEQ ID NO: 1137 - RNA, 19 nt, Artificial Sequence
  Description of Artificial Sequence: Target Sequence/siNA antisense region
cugcccaguugaagaggua

SEQ ID NO: 1138 - RNA, 19 nt, Artificial Sequence
  Description of Artificial Sequence: Target Sequence/siNA antisense region
cccuguugcauaguucacg

SEQ ID NO: 1139 - RNA, 19 nt, Artificial Sequence
  Description of Artificial Sequence: Target Sequence/siNA antisense region
ugugggcggcgguuggugu

SEQ ID NO: 1140 - RNA, 19 nt, Artificial Sequence
  Description of Artificial Sequence: Target Sequence/siNA antisense region
gaucugaccaccgcccggg

SEQ ID NO: 1141 - RNA, 19 nt, Artificial Sequence
  Description of Artificial Sequence: Target Sequence/siNA antisense region
acugcccaguugaagaggu

SEQ ID NO: 1142 - RNA, 19 nt, Artificial Sequence
  Description of Artificial Sequence: Target Sequence/siNA antisense region
ccccaugaggucggcgaag

SEQ ID NO: 1143 - RNA, 19 nt, Artificial Sequence
  Description of Artificial Sequence: Target Sequence/siNA antisense region
gccccugcgcggcaacagg

SEQ ID NO: 1144 - RNA, 19 nt, Artificial Sequence
  Description of Artificial Sequence: Target Sequence/siNA antisense region
uccugugggcggcgguugg

SEQ ID NO: 1145 - RNA, 19 nt, Artificial Sequence
  Description of Artificial Sequence: Target Sequence/siNA antisense region
ccugugggcggcgguuggu

SEQ ID NO: 1146 - RNA, 19 nt, Artificial Sequence
  Description of Artificial Sequence: Target Sequence/siNA antisense region
cggcaacagguaaacucca

SEQ ID NO: 1147 - RNA, 19 nt, Artificial Sequence
  Description of Artificial Sequence: Target Sequence/siNA antisense region
cugugggcggcgguuggug

SEQ ID NO: 1148 - RNA, 19 nt, Artificial Sequence
  Description of Artificial Sequence: Target Sequence/siNA antisense region
gcgguugguguuacguuug

SEQ ID NO: 1149 - RNA, 19 nt, Artificial Sequence
  Description of Artificial Sequence: Target Sequence/siNA antisense region
cuccagccgucuccgcuug

SEQ ID NO: 1150 - RNA, 19 nt, Artificial Sequence
  Description of Artificial Sequence: Target Sequence/siNA antisense region
accuagucauagccuccgu

SEQ ID NO: 1151 - RNA, 19 nt, Artificial Sequence
  Description of Artificial Sequence: Target Sequence/siNA antisense region
ugggcggcgguugguguua

SEQ ID NO: 1152 - RNA, 19 nt, Artificial Sequence
  Description of Artificial Sequence: Target Sequence/siNA antisense region
gguaaacuccaccaacgau

SEQ ID NO: 1153 - RNA, 19 nt, Artificial Sequence
  Description of Artificial Sequence: Target Sequence/siNA antisense region
gcugugauauaugucuccc

SEQ ID NO: 1154 - RNA, 19 nt, Artificial Sequence
  Description of Artificial Sequence: Target Sequence/siNA antisense region
ugucgccuuccacgagguu

SEQ ID NO: 1155 - RNA, 19 nt, Artificial Sequence
  Description of Artificial Sequence: Target Sequence/siNA antisense region
ugugauauaugucuccccc

SEQ ID NO: 1156 - RNA, 19 nt, Artificial Sequence
  Description of Artificial Sequence: Target Sequence/siNA antisense region
cggcgguugguguuacguu

SEQ ID NO: 1157 - RNA, 19 nt, Artificial Sequence
  Description of Artificial Sequence: Target Sequence/siNA antisense region
ggcgguugguguuacguuu

SEQ ID NO: 1158 - RNA, 19 nt, Artificial Sequence
  Description of Artificial Sequence: Target Sequence/siNA antisense region
cugugauauaugucucccc

SEQ ID NO: 1159 - RNA, 19 nt, Artificial Sequence
  Description of Artificial Sequence: Target Sequence/siNA antisense region
acgccuucgccuucaucuc

SEQ ID NO: 1160 - RNA, 19 nt, Artificial Sequence
  Description of Artificial Sequence: Target Sequence/siNA antisense region
gcuccagccgucuccgcuu

SEQ ID NO: 1161 - RNA, 19 nt, Artificial Sequence
  Description of Artificial Sequence: Target Sequence/siNA antisense region
auagaggggccaaggguac

SEQ ID NO: 1162 - RNA, 19 nt, Artificial Sequence
  Description of Artificial Sequence: Target Sequence/siNA antisense region
ggaggggggguccuggagg

SEQ ID NO: 1163 - RNA, 19 nt, Artificial Sequence
  Description of Artificial Sequence: Target Sequence/siNA antisense region
gggaggggggguccuggag

SEQ ID NO: 1164 - RNA, 19 nt, Artificial Sequence
  Description of Artificial Sequence: Target Sequence/siNA antisense region
cauagaggggccaagggua

SEQ ID NO: 1165 - RNA, 19 nt, Artificial Sequence
  Description of Artificial Sequence: Target Sequence/siNA antisense region
gucgccuuccacgagguug

SEQ ID NO: 1166 - RNA, 19 nt, Artificial Sequence
  Description of Artificial Sequence: Target Sequence/siNA antisense region
uaccuagucauagccuccg

SEQ ID NO: 1167 - RNA, 19 nt, Artificial Sequence
  Description of Artificial Sequence: Target Sequence/siNA antisense region
cgccuucgccuucaucucc

SEQ ID NO: 1168 - RNA, 19 nt, Artificial Sequence
  Description of Artificial Sequence: Target Sequence/siNA antisense region
gacgccuucgccuucaucu

SEQ ID NO: 1169 - RNA, 19 nt, Artificial Sequence
  Description of Artificial Sequence: Target Sequence/siNA antisense region
gggcggcgguugguguuac

SEQ ID NO: 1170 - RNA, 19 nt, Artificial Sequence
  Description of Artificial Sequence: Target Sequence/siNA antisense region
ggcggcgguugguguuacg

SEQ ID NO: 1171 - RNA, 19 nt, Artificial Sequence
  Description of Artificial Sequence: Target Sequence/siNA antisense region
gcggcgguugguguuacgu

SEQ ID NO: 1172 - RNA, 19 nt, Artificial Sequence
  Description of Artificial Sequence: Target Sequence/siNA antisense region
ccuagucauagccuccgug

SEQ ID NO: 1173 - RNA, 19 nt, Artificial Sequence
  Description of Artificial Sequence: Target Sequence/siNA antisense region
acagguaaacuccaccaac

SEQ ID NO: 1174 - RNA, 19 nt, Artificial Sequence
  Description of Artificial Sequence: Target Sequence/siNA antisense region
cagguaaacuccaccaacg

SEQ ID NO: 1175 - RNA, 19 nt, Artificial Sequence
  Description of Artificial Sequence: Target Sequence/siNA antisense region
ccauagaggggccaagggu

SEQ ID NO: 1176 - RNA, 19 nt, Artificial Sequence
  Description of Artificial Sequence: Target Sequence/siNA antisense region
aacagguaaacuccaccaa

SEQ ID NO: 1177 - RNA, 19 nt, Artificial Sequence
  Description of Artificial Sequence: Target Sequence/siNA antisense region
caacagguaaacuccacca

SEQ ID NO: 1178 - RNA, 19 nt, Artificial Sequence
  Description of Artificial Sequence: Target Sequence/siNA antisense region
agguaaacuccaccaacga

SEQ ID NO: 1179 - RNA, 19 nt, Artificial Sequence
  Description of Artificial Sequence: Target Sequence/siNA antisense region
gaggggccaaggguacccg

SEQ ID NO: 1180 - RNA, 19 nt, Artificial Sequence
  Description of Artificial Sequence: Target Sequence/siNA antisense region
aggguacccgggcugagcc

SEQ ID NO: 1181 - RNA, 19 nt, Artificial Sequence
  Description of Artificial Sequence: Target Sequence/siNA antisense region
uccucacaggggagugauc

SEQ ID NO: 1182 - RNA, 19 nt, Artificial Sequence
  Description of Artificial Sequence: Target Sequence/siNA antisense region
caccaacgaucugaccacc

SEQ ID NO: 1183 - RNA, 19 nt, Artificial Sequence
  Description of Artificial Sequence: Target Sequence/siNA antisense region
ggacgccuucgccuucauc

SEQ ID NO: 1184 - RNA, 19 nt, Artificial Sequence
  Description of Artificial Sequence: Target Sequence/siNA antisense region
gggugacaggagccauccu

SEQ ID NO: 1185 - RNA, 19 nt, Artificial Sequence
  Description of Artificial Sequence: Target Sequence/siNA antisense region
caaggguacccgggcugag

SEQ ID NO: 1186 - RNA, 19 nt, Artificial Sequence
  Description of Artificial Sequence: Target Sequence/siNA antisense region
ccaaggguacccgggcuga

SEQ ID NO: 1187 - RNA, 19 nt, Artificial Sequence
  Description of Artificial Sequence: Target Sequence/siNA antisense region
uggacgccuucgccuucau

SEQ ID NO: 1188 - RNA, 19 nt, Artificial Sequence
  Description of Artificial Sequence: Target Sequence/siNA antisense region
gugauauaugucucccccg

SEQ ID NO: 1189 - RNA, 19 nt, Artificial Sequence
  Description of Artificial Sequence: Target Sequence/siNA antisense region
ggugacaggagccauccug

SEQ ID NO: 1190 - RNA, 19 nt, Artificial Sequence
  Description of Artificial Sequence: Target Sequence/siNA antisense region
guggacgccuucgccuuca

SEQ ID NO: 1191 - RNA, 19 nt, Artificial Sequence
  Description of Artificial Sequence: Target Sequence/siNA antisense region
uccaccaacgaucugacca

SEQ ID NO: 1192 - RNA, 19 nt, Artificial Sequence
  Description of Artificial Sequence: Target Sequence/siNA antisense region
aaggguacccgggcugagc

SEQ ID NO: 1193 - RNA, 19 nt, Artificial Sequence
  Description of Artificial Sequence: Target Sequence/siNA antisense region
ccaccaacgaucugaccac

SEQ ID NO: 1194 - RNA, 19 nt, Artificial Sequence
  Description of Artificial Sequence: Target Sequence/siNA antisense region
ggggggguccuggaggcug

SEQ ID NO: 1195 - RNA, 19 nt, Artificial Sequence
  Description of Artificial Sequence: Target Sequence/siNA antisense region
caacgaucugaccaccgcc

SEQ ID NO: 1196 - RNA, 19 nt, Artificial Sequence
  Description of Artificial Sequence: Target Sequence/siNA antisense region
gaggggggguccuggaggc

SEQ ID NO: 1197 - RNA, 19 nt, Artificial Sequence
  Description of Artificial Sequence: Target Sequence/siNA antisense region
cgaacgcuaucagccgguu

SEQ ID NO: 1198 - RNA, 19 nt, Artificial Sequence
  Description of Artificial Sequence: Target Sequence/siNA antisense region
aggggggguccuggaggcu

SEQ ID NO: 1199 - RNA, 19 nt, Artificial Sequence
  Description of Artificial Sequence: Target Sequence/siNA antisense region
caugaggucggcgaagccg

SEQ ID NO: 1200 - RNA, 19 nt, Artificial Sequence
  Description of Artificial Sequence: Target Sequence/siNA antisense region
gcgcuccagccgucuccgc

SEQ ID NO: 1201 - RNA, 19 nt, Artificial Sequence
  Description of Artificial Sequence: Target Sequence/siNA antisense region
agcggaauguaccccauga

SEQ ID NO: 1202 - RNA, 19 nt, Artificial Sequence
  Description of Artificial Sequence: Target Sequence/siNA antisense region
gaacgcuaucagccgguuc

SEQ ID NO: 1203 - RNA, 19 nt, Artificial Sequence
  Description of Artificial Sequence: Target Sequence/siNA antisense region
ccaacgaucugaccaccgc

SEQ ID NO: 1204 - RNA, 19 nt, Artificial Sequence
  Description of Artificial Sequence: Target Sequence/siNA antisense region
ugacaggagccauccugcc

SEQ ID NO: 1205 - RNA, 19 nt, Artificial Sequence
  Description of Artificial Sequence: Target Sequence/siNA antisense region
gugacaggagccauccugc

SEQ ID NO: 1206 - RNA, 19 nt, Artificial Sequence
  Description of Artificial Sequence: Target Sequence/siNA antisense region
ucgaugaccuuacccaaau

SEQ ID NO: 1207 - RNA, 19 nt, Artificial Sequence
  Description of Artificial Sequence: Target Sequence/siNA antisense region
gcgaacgcuaucagccggu

SEQ ID NO: 1208 - RNA, 19 nt, Artificial Sequence
  Description of Artificial Sequence: Target Sequence/siNA antisense region
cgcgcuccagccgucuccg

SEQ ID NO: 1209 - RNA, 19 nt, Artificial Sequence
  Description of Artificial Sequence: Target Sequence/siNA antisense region
augaggucggcgaagccgc

SEQ ID NO: 1210 - RNA, 19 nt, Artificial Sequence
  Description of Artificial Sequence: Target Sequence/siNA antisense region
cgaugaccuuacccaaauu

SEQ ID NO: 1211 - RNA, 19 nt, Artificial Sequence
  Description of Artificial Sequence: Target Sequence/siNA antisense region
aacgaucugaccaccgccc

SEQ ID NO: 1212 - RNA, 19 nt, Artificial Sequence
  Description of Artificial Sequence: Target Sequence/siNA antisense region
guccugugggcggcgguug

SEQ ID NO: 1213 - RNA, 19 nt, Artificial Sequence
  Description of Artificial Sequence: Target Sequence/siNA antisense region
ugaggucggcgaagccgca

SEQ ID NO: 1214 - RNA, 19 nt, Artificial Sequence
  Description of Artificial Sequence: Target Sequence/siNA antisense region
accaacgaucugaccaccg

SEQ ID NO: 1215 - RNA, 19 nt, Artificial Sequence
  Description of Artificial Sequence: Target Sequence/siNA antisense region
uagucgcgcgcacacccaa

SEQ ID NO: 1216 - RNA, 19 nt, Artificial Sequence
  Description of Artificial Sequence: Target Sequence/siNA antisense region
uuccuagucgcgcgcacac

SEQ ID NO: 1217 - RNA, 19 nt, Artificial Sequence
  Description of Artificial Sequence: Target Sequence/siNA antisense region
cggggugacaggagccauc

SEQ ID NO: 1218 - RNA, 19 nt, Artificial Sequence
  Description of Artificial Sequence: Target Sequence/siNA antisense region
ggggugacaggagccaucc

SEQ ID NO: 1219 - RNA, 19 nt, Artificial Sequence
  Description of Artificial Sequence: Target Sequence/siNA antisense region
cuuccuagucgcgcgcaca

SEQ ID NO: 1220 - RNA, 19 nt, Artificial Sequence
  Description of Artificial Sequence: Target Sequence/siNA antisense region
cuagucgcgcgcacaccca

SEQ ID NO: 1221 - RNA, 19 nt, Artificial Sequence
  Description of Artificial Sequence: Target Sequence/siNA antisense region
uccuagucgcgcgcacacc

SEQ ID NO: 1222 - RNA, 19 nt, Artificial Sequence
  Description of Artificial Sequence: Target Sequence/siNA antisense region
ccuagucgcgcgcacaccc

SEQ ID NO: 1223 - RNA, 19 nt, Artificial Sequence
  Description of Artificial Sequence: Target Sequence/siNA antisense region
uacgcgaccuacgccgggg

SEQ ID NO: 1224 - RNA, 19 nt, Artificial Sequence
  Description of Artificial Sequence: Target Sequence/siNA antisense region
gggauagguugucgccuuc

SEQ ID NO: 1225 - RNA, 19 nt, Artificial Sequence
  Description of Artificial Sequence: Target Sequence/siNA antisense region
uuacgcgaccuacgccggg

SEQ ID NO: 1226 - RNA, 19 nt, Artificial Sequence
  Description of Artificial Sequence: Target Sequence/siNA antisense region
cgcuccagccgucuccgcu

SEQ ID NO: 1227 - RNA, 19 nt, Artificial Sequence
  Description of Artificial Sequence: Target Sequence/siNA antisense region
acgcgaccuacgccggggg

SEQ ID NO: 1228 - RNA, 19 nt, Artificial Sequence
  Description of Artificial Sequence: Target Sequence/siNA antisense region
acuguggacgccuucgccu

SEQ ID NO: 1229 - RNA, 19 nt, Artificial Sequence
  Description of Artificial Sequence: Target Sequence/siNA antisense region
cuguggacgccuucgccuu

SEQ ID NO: 1230 - RNA, 19 nt, Artificial Sequence
  Description of Artificial Sequence: Target Sequence/siNA antisense region
agucgcgcgcacacccaac

SEQ ID NO: 1231 - RNA, 19 nt, Artificial Sequence
  Description of Artificial Sequence: Target Sequence/siNA antisense region
gcggaauguaccccaugag

SEQ ID NO: 1232 - RNA, 19 nt, Artificial Sequence
  Description of Artificial Sequence: Target Sequence/siNA antisense region
ggauagguugucgccuucc

SEQ ID NO: 1233 - RNA, 19 nt, Artificial Sequence
  Description of Artificial Sequence: Target Sequence/siNA antisense region
ccgucggcaaggaacuugc

SEQ ID NO: 1234 - RNA, 19 nt, Artificial Sequence
  Description of Artificial Sequence: Target Sequence/siNA antisense region
ggggguccuggaggcugca

SEQ ID NO: 1235 - RNA, 19 nt, Artificial Sequence
  Description of Artificial Sequence: Target Sequence/siNA antisense region
cacgagcaucgugcagucc

SEQ ID NO: 1236 - RNA, 19 nt, Artificial Sequence
  Description of Artificial Sequence: Target Sequence/siNA antisense region
uguggacgccuucgccuuc

SEQ ID NO: 1237 - RNA, 19 nt, Artificial Sequence
  Description of Artificial Sequence: Target Sequence/siNA antisense region
ucgccuuccacgagguugc

SEQ ID NO: 1238 - RNA, 19 nt, Artificial Sequence
  Description of Artificial Sequence: Target Sequence/siNA antisense region
accaagcacagcccgcguc

SEQ ID NO: 1239 - RNA, 19 nt, Artificial Sequence
  Description of Artificial Sequence: Target Sequence/siNA antisense region
uaccaagcacagcccgcgu

SEQ ID NO: 1240 - RNA, 19 nt, Artificial Sequence
  Description of Artificial Sequence: Target Sequence/siNA antisense region
gggguccuggaggcugcac

SEQ ID NO: 1241 - RNA, 19 nt, Artificial Sequence
  Description of Artificial Sequence: Target Sequence/siNA antisense region
gggggguccuggaggcugc

SEQ ID NO: 1242 - RNA, 19 nt, Artificial Sequence
  Description of Artificial Sequence: Target Sequence/siNA antisense region
cgccuuccacgagguugcg

SEQ ID NO: 1243 - RNA, 19 nt, Artificial Sequence
  Description of Artificial Sequence: Target Sequence/siNA antisense region
uccuggaggcugcacgaca

SEQ ID NO: 1244 - RNA, 19 nt, Artificial Sequence
  Description of Artificial Sequence: Target Sequence/siNA antisense region
ucaucauaucccaagccau

SEQ ID NO: 1245 - RNA, 19 nt, Artificial Sequence
  Description of Artificial Sequence: Target Sequence/siNA antisense region
uucaucaucauaucccaag

SEQ ID NO: 1246 - RNA, 19 nt, Artificial Sequence
  Description of Artificial Sequence: Target Sequence/siNA antisense region
gccauagaggggccaaggg

SEQ ID NO: 1247 - RNA, 19 nt, Artificial Sequence
  Description of Artificial Sequence: Target Sequence/siNA antisense region
aucaucauaucccaagcca

SEQ ID NO: 1248 - RNA, 19 nt, Artificial Sequence
  Description of Artificial Sequence: Target Sequence/siNA antisense region
cgguucauccacugcacag

SEQ ID NO: 1249 - RNA, 19 nt, Artificial Sequence
  Description of Artificial Sequence: Target Sequence/siNA antisense region
caagcacagcccgcgucau

SEQ ID NO: 1250 - RNA, 19 nt, Artificial Sequence
  Description of Artificial Sequence: Target Sequence/siNA antisense region
ucaucaucauaucccaagc

SEQ ID NO: 1251 - RNA, 19 nt, Artificial Sequence
  Description of Artificial Sequence: Target Sequence/siNA antisense region
aagcacagcccgcgucaua

SEQ ID NO: 1252 - RNA, 19 nt, Artificial Sequence
  Description of Artificial Sequence: Target Sequence/siNA antisense region
ccaagcacagcccgcguca

SEQ ID NO: 1253 - RNA, 19 nt, Artificial Sequence
  Description of Artificial Sequence: Target Sequence/siNA antisense region
caucaucauaucccaagcc

SEQ ID NO: 1254 - RNA, 19 nt, Artificial Sequence
  Description of Artificial Sequence: Target Sequence/siNA antisense region
ccgguucauccacugcaca

SEQ ID NO: 1255 - RNA, 19 nt, Artificial Sequence
  Description of Artificial Sequence: Target Sequence/siNA antisense region
gguucauccacugcacagc

SEQ ID NO: 1256 - RNA, 19 nt, Artificial Sequence
  Description of Artificial Sequence: Target Sequence/siNA antisense region
uuacugcccaguugaagag

SEQ ID NO: 1257 - RNA, 19 nt, Artificial Sequence
  Description of Artificial Sequence: Target Sequence/siNA antisense region
guugucgccuuccacgagg

SEQ ID NO: 1258 - RNA, 19 nt, Artificial Sequence
  Description of Artificial Sequence: Target Sequence/siNA antisense region
cgacugucugggugacaca

SEQ ID NO: 1259 - RNA, 19 nt, Artificial Sequence
  Description of Artificial Sequence: Target Sequence/siNA antisense region
cuguugcauaguucacgcc

SEQ ID NO: 1260 - RNA, 19 nt, Artificial Sequence
  Description of Artificial Sequence: Target Sequence/siNA antisense region
uguugcauaguucacgccg

SEQ ID NO: 1261 - RNA, 19 nt, Artificial Sequence
  Description of Artificial Sequence: Target Sequence/siNA antisense region
ucgacugucugggugacac

SEQ ID NO: 1262 - RNA, 19 nt, Artificial Sequence
  Description of Artificial Sequence: Target Sequence/siNA antisense region
uacugcccaguugaagagg

SEQ ID NO: 1263 - RNA, 19 nt, Artificial Sequence
  Description of Artificial Sequence: Target Sequence/siNA antisense region
uagguugucgccuuccacg

SEQ ID NO: 1264 - RNA, 19 nt, Artificial Sequence
  Description of Artificial Sequence: Target Sequence/siNA antisense region
agguugucgccuuccacga

SEQ ID NO: 1265 - RNA, 19 nt, Artificial Sequence
  Description of Artificial Sequence: Target Sequence/siNA antisense region
uggggccccaacuaggccg

SEQ ID NO: 1266 - RNA, 19 nt, Artificial Sequence
  Description of Artificial Sequence: Target Sequence/siNA antisense region
ucggaagucuuccuagucg

SEQ ID NO: 1267 - RNA, 19 nt, Artificial Sequence
  Description of Artificial Sequence: Target Sequence/siNA antisense region
aucgaugaccuuacccaaa

SEQ ID NO: 1268 - RNA, 19 nt, Artificial Sequence
  Description of Artificial Sequence: Target Sequence/siNA antisense region
auagguugucgccuuccac

SEQ ID NO: 1269 - RNA, 19 nt, Artificial Sequence
  Description of Artificial Sequence: Target Sequence/siNA antisense region
uugucgccuuccacgaggu

SEQ ID NO: 1270 - RNA, 19 nt, Artificial Sequence
  Description of Artificial Sequence: Target Sequence/siNA antisense region
cggaagucuuccuagucgc

SEQ ID NO: 1271 - RNA, 19 nt, Artificial Sequence
  Description of Artificial Sequence: Target Sequence/siNA antisense region
guccuggaggcugcacgac

SEQ ID NO: 1272 - RNA, 19 nt, Artificial Sequence
  Description of Artificial Sequence: Target Sequence/siNA antisense region
ccgcucggaagucuuccua

SEQ ID NO: 1273 - RNA, 19 nt, Artificial Sequence
  Description of Artificial Sequence: Target Sequence/siNA antisense region
guugcauaguucacgccgu

SEQ ID NO: 1274 - RNA, 19 nt, Artificial Sequence
  Description of Artificial Sequence: Target Sequence/siNA antisense region
gguugucgccuuccacgag

SEQ ID NO: 1275 - RNA, 19 nt, Artificial Sequence
  Description of Artificial Sequence: Target Sequence/siNA antisense region
cuuccacgagguugcgacc

SEQ ID NO: 1276 - RNA, 19 nt, Artificial Sequence
  Description of Artificial Sequence: Target Sequence/siNA antisense region
uuccacgagguugcgaccg

SEQ ID NO: 1277 - RNA, 19 nt, Artificial Sequence
  Description of Artificial Sequence: Target Sequence/siNA antisense region
agucuuccuagucgcgcgc

SEQ ID NO: 1278 - RNA, 19 nt, Artificial Sequence
  Description of Artificial Sequence: Target Sequence/siNA antisense region
uugcauaguucacgccguc

SEQ ID NO: 1279 - RNA, 19 nt, Artificial Sequence
  Description of Artificial Sequence: Target Sequence/siNA antisense region
cucacaggggagugaucua

SEQ ID NO: 1280 - RNA, 19 nt, Artificial Sequence
  Description of Artificial Sequence: Target Sequence/siNA antisense region
ccacgagguugcgaccgcu

SEQ ID NO: 1281 - RNA, 19 nt, Artificial Sequence
  Description of Artificial Sequence: Target Sequence/siNA antisense region
gauagguugucgccuucca

SEQ ID NO: 1282 - RNA, 19 nt, Artificial Sequence
  Description of Artificial Sequence: Target Sequence/siNA antisense region
aagucuuccuagucgcgcg

SEQ ID NO: 1283 - RNA, 19 nt, Artificial Sequence
  Description of Artificial Sequence: Target Sequence/siNA antisense region
cgcucggaagucuuccuag

SEQ ID NO: 1284 - RNA, 19 nt, Artificial Sequence
  Description of Artificial Sequence: Target Sequence/siNA antisense region
ucuuccuagucgcgcgcac

SEQ ID NO: 1285 - RNA, 19 nt, Artificial Sequence
  Description of Artificial Sequence: Target Sequence/siNA antisense region
ccucacaggggagugaucu

SEQ ID NO: 1286 - RNA, 19 nt, Artificial Sequence
  Description of Artificial Sequence: Target Sequence/siNA antisense region
gucuuccuagucgcgcgca

SEQ ID NO: 1287 - RNA, 19 nt, Artificial Sequence
  Description of Artificial Sequence: Target Sequence/siNA antisense region
ucacaggggagugaucuau

SEQ ID NO: 1288 - RNA, 19 nt, Artificial Sequence
  Description of Artificial Sequence: Target Sequence/siNA antisense region
cacgagguugcgaccgcuc

SEQ ID NO: 1289 - RNA, 19 nt, Artificial Sequence
  Description of Artificial Sequence: Target Sequence/siNA antisense region
guuggagcagucguucgug

SEQ ID NO: 1290 - RNA, 19 nt, Artificial Sequence
  Description of Artificial Sequence: Target Sequence/siNA antisense region
cgucggcaaggaacuugcc

SEQ ID NO: 1291 - RNA, 19 nt, Artificial Sequence
  Description of Artificial Sequence: Target Sequence/siNA antisense region
gguccuggaggcugcacga

SEQ ID NO: 1292 - RNA, 19 nt, Artificial Sequence
  Description of Artificial Sequence: Target Sequence/siNA antisense region
uggagcagucguucgugac

SEQ ID NO: 1293 - RNA, 19 nt, Artificial Sequence
  Description of Artificial Sequence: Target Sequence/siNA antisense region
uccacgagguugcgaccgc

SEQ ID NO: 1294 - RNA, 19 nt, Artificial Sequence
  Description of Artificial Sequence: Target Sequence/siNA antisense region
gaagucuuccuagucgcgc

SEQ ID NO: 1295 - RNA, 19 nt, Artificial Sequence
  Description of Artificial Sequence: Target Sequence/siNA antisense region
gcacagcccgcgucauagc

SEQ ID NO: 1296 - RNA, 19 nt, Artificial Sequence
  Description of Artificial Sequence: Target Sequence/siNA antisense region
uuggagcagucguucguga

SEQ ID NO: 1297 - RNA, 19 nt, Artificial Sequence
  Description of Artificial Sequence: Target Sequence/siNA antisense region
gccuuccacgagguugcga

SEQ ID NO: 1298 - RNA, 19 nt, Artificial Sequence
  Description of Artificial Sequence: Target Sequence/siNA antisense region
ggguccuggaggcugcacg

SEQ ID NO: 1299 - RNA, 19 nt, Artificial Sequence
  Description of Artificial Sequence: Target Sequence/siNA antisense region
ccuuccacgagguugcgac

SEQ ID NO: 1300 - RNA, 19 nt, Artificial Sequence
  Description of Artificial Sequence: Target Sequence/siNA antisense region
gcucggaagucuuccuagu

SEQ ID NO: 1301 - RNA, 19 nt, Artificial Sequence
  Description of Artificial Sequence: Target Sequence/siNA antisense region
ggaagucuuccuagucgcg

SEQ ID NO: 1302 - RNA, 19 nt, Artificial Sequence
  Description of Artificial Sequence: Target Sequence/siNA antisense region
uccacaugugcuucgccca

SEQ ID NO: 1303 - RNA, 19 nt, Artificial Sequence
  Description of Artificial Sequence: Target Sequence/siNA antisense region
cauggaauaguaggcaagg

SEQ ID NO: 1304 - RNA, 19 nt, Artificial Sequence
  Description of Artificial Sequence: Target Sequence/siNA antisense region
accccaaguuuccugaggc

SEQ ID NO: 1305 - RNA, 19 nt, Artificial Sequence
  Description of Artificial Sequence: Target Sequence/siNA antisense region
cacagcccgcgucauagca

SEQ ID NO: 1306 - RNA, 19 nt, Artificial Sequence
  Description of Artificial Sequence: Target Sequence/siNA antisense region
guagcgguggcgagcacga

SEQ ID NO: 1307 - RNA, 19 nt, Artificial Sequence
  Description of Artificial Sequence: Target Sequence/siNA antisense region
ccccaaguuuccugaggca

SEQ ID NO: 1308 - RNA, 19 nt, Artificial Sequence
  Description of Artificial Sequence: Target Sequence/siNA antisense region
cggggucgggcacgagaca

SEQ ID NO: 1309 - RNA, 19 nt, Artificial Sequence
  Description of Artificial Sequence: Target Sequence/siNA antisense region
cccaucuccugccgccaca

SEQ ID NO: 1310 - RNA, 19 nt, Artificial Sequence
  Description of Artificial Sequence: Target Sequence/siNA antisense region
uagcgguggcgagcacgac

SEQ ID NO: 1311 - RNA, 19 nt, Artificial Sequence
  Description of Artificial Sequence: Target Sequence/siNA antisense region
ccgucacguaguggaaauc

SEQ ID NO: 1312 - RNA, 19 nt, Artificial Sequence
  Description of Artificial Sequence: Target Sequence/siNA antisense region
ggaauaguaggcaaggccc

SEQ ID NO: 1313 - RNA, 19 nt, Artificial Sequence
  Description of Artificial Sequence: Target Sequence/siNA antisense region
auggaauaguaggcaaggc

SEQ ID NO: 1314 - RNA, 19 nt, Artificial Sequence
  Description of Artificial Sequence: Target Sequence/siNA antisense region
cucggaagucuuccuaguc

SEQ ID NO: 1315 - RNA, 19 nt, Artificial Sequence
  Description of Artificial Sequence: Target Sequence/siNA antisense region
ugauauaugucucccccgc

SEQ ID NO: 1316 - RNA, 19 nt, Artificial Sequence
  Description of Artificial Sequence: Target Sequence/siNA antisense region
acgagguugcgaccgcucg

SEQ ID NO: 1317 - RNA, 19 nt, Artificial Sequence
  Description of Artificial Sequence: Target Sequence/siNA antisense region
uggaauaguaggcaaggcc

SEQ ID NO: 1318 - RNA, 19 nt, Artificial Sequence
  Description of Artificial Sequence: Target Sequence/siNA antisense region
cccgucacguaguggaaau

SEQ ID NO: 1319 - RNA, 19 nt, Artificial Sequence
  Description of Artificial Sequence: Target Sequence/siNA antisense region
gcccgggaacuugacgucc

SEQ ID NO: 1320 - RNA, 19 nt, Artificial Sequence
  Description of Artificial Sequence: Target Sequence/siNA antisense region
agcccgcgucauagcacuc

SEQ ID NO: 1321 - RNA, 19 nt, Artificial Sequence
  Description of Artificial Sequence: Target Sequence/siNA antisense region
cgcccgggaacuugacguc

SEQ ID NO: 1322 - RNA, 19 nt, Artificial Sequence
  Description of Artificial Sequence: Target Sequence/siNA antisense region
gaccaagacccgucgcuga

SEQ ID NO: 1323 - RNA, 19 nt, Artificial Sequence
  Description of Artificial Sequence: Target Sequence/siNA antisense region
ccaccgcccgggaacuuga

SEQ ID NO: 1324 - RNA, 19 nt, Artificial Sequence
  Description of Artificial Sequence: Target Sequence/siNA antisense region
uucgccuucaucuccuuga

SEQ ID NO: 1325 - RNA, 19 nt, Artificial Sequence
  Description of Artificial Sequence: Target Sequence/siNA antisense region
ggcgagccuuggggauagg

SEQ ID NO: 1326 - RNA, 19 nt, Artificial Sequence
  Description of Artificial Sequence: Target Sequence/siNA antisense region
ugaucugagguaggucaag

SEQ ID NO: 1327 - RNA, 19 nt, Artificial Sequence
  Description of Artificial Sequence: Target Sequence/siNA antisense region
gcccgucacguaguggaaa

SEQ ID NO: 1328 - RNA, 19 nt, Artificial Sequence
  Description of Artificial Sequence: Target Sequence/siNA antisense region
cagcccgcgucauagcacu

SEQ ID NO: 1329 - RNA, 19 nt, Artificial Sequence
  Description of Artificial Sequence: Target Sequence/siNA antisense region
ccgcccgggaacuugacgu

SEQ ID NO: 1330 - RNA, 19 nt, Artificial Sequence
  Description of Artificial Sequence: Target Sequence/siNA antisense region
cuggcccgaugucuccaga

SEQ ID NO: 1331 - RNA, 19 nt, Artificial Sequence
  Description of Artificial Sequence: Target Sequence/siNA antisense region
uuccacaugugcuucgccc

SEQ ID NO: 1332 - RNA, 19 nt, Artificial Sequence
  Description of Artificial Sequence: Target Sequence/siNA antisense region
augaucugagguaggucaa

SEQ ID NO: 1333 - RNA, 19 nt, Artificial Sequence
  Description of Artificial Sequence: Target Sequence/siNA antisense region
uccagccgucuccgcuugg

SEQ ID NO: 1334 - RNA, 19 nt, Artificial Sequence
  Description of Artificial Sequence: Target Sequence/siNA antisense region
ccagccgucuccgcuuggu

SEQ ID NO: 1335 - RNA, 19 nt, Artificial Sequence
  Description of Artificial Sequence: Target Sequence/siNA antisense region
cugaggcaugaagccaccc

SEQ ID NO: 1336 - RNA, 19 nt, Artificial Sequence
  Description of Artificial Sequence: Target Sequence/siNA antisense region
caccgcccgggaacuugac

SEQ ID NO: 1337 - RNA, 19 nt, Artificial Sequence
  Description of Artificial Sequence: Target Sequence/siNA antisense region
ucgccuucaucuccuugag

SEQ ID NO: 1338 - RNA, 19 nt, Artificial Sequence
  Description of Artificial Sequence: Target Sequence/siNA antisense region
cagccgucuccgcuugguc

SEQ ID NO: 1339 - RNA, 19 nt, Artificial Sequence
  Description of Artificial Sequence: Target Sequence/siNA antisense region
ugguugagcccgaccugga

SEQ ID NO: 1340 - RNA, 19 nt, Artificial Sequence
  Description of Artificial Sequence: Target Sequence/siNA antisense region
gaggaagauagagaaagag

SEQ ID NO: 1341 - RNA, 19 nt, Artificial Sequence
  Description of Artificial Sequence: Target Sequence/siNA antisense region
uggcccgaugucuccagac

SEQ ID NO: 1342 - RNA, 19 nt, Artificial Sequence
  Description of Artificial Sequence: Target Sequence/siNA antisense region
ucgggggccaagucacaac

SEQ ID NO: 1343 - RNA, 19 nt, Artificial Sequence
  Description of Artificial Sequence: Target Sequence/siNA antisense region
uuggacuggagccaggucu

SEQ ID NO: 1344 - RNA, 19 nt, Artificial Sequence
  Description of Artificial Sequence: Target Sequence/siNA antisense region
ccauggaauaguaggcaag

SEQ ID NO: 1345 - RNA, 19 nt, Artificial Sequence
  Description of Artificial Sequence: Target Sequence/siNA antisense region
uagagaaagagcaaccggg

SEQ ID NO: 1346 - RNA, 19 nt, Artificial Sequence
  Description of Artificial Sequence: Target Sequence/siNA antisense region
aagaggaagauagagaaag

SEQ ID NO: 1347 - RNA, 19 nt, Artificial Sequence
  Description of Artificial Sequence: Target Sequence/siNA antisense region
ugaggcaugaagccacccu

SEQ ID NO: 1348 - RNA, 19 nt, Artificial Sequence
  Description of Artificial Sequence: Target Sequence/siNA antisense region
uggacuggagccaggucuu

SEQ ID NO: 1349 - RNA, 19 nt, Artificial Sequence
  Description of Artificial Sequence: Target Sequence/siNA antisense region
auagagaaagagcaaccgg

SEQ ID NO: 1350 - RNA, 19 nt, Artificial Sequence
  Description of Artificial Sequence: Target Sequence/siNA antisense region
gauagagaaagagcaaccg

SEQ ID NO: 1351 - RNA, 19 nt, Artificial Sequence
  Description of Artificial Sequence: Target Sequence/siNA antisense region
acguaguggaaauccccca

SEQ ID NO: 1352 - RNA, 19 nt, Artificial Sequence
  Description of Artificial Sequence: Target Sequence/siNA antisense region
gagcagucguucgugacau

SEQ ID NO: 1353 - RNA, 19 nt, Artificial Sequence
  Description of Artificial Sequence: Target Sequence/siNA antisense region
guggggccccaacuaggcc

SEQ ID NO: 1354 - RNA, 19 nt, Artificial Sequence
  Description of Artificial Sequence: Target Sequence/siNA antisense region
gccgucuccgcuuggucca

SEQ ID NO: 1355 - RNA, 19 nt, Artificial Sequence
  Description of Artificial Sequence: Target Sequence/siNA antisense region
gguugagcccgaccuggaa

SEQ ID NO: 1356 - RNA, 19 nt, Artificial Sequence
  Description of Artificial Sequence: Target Sequence/siNA antisense region
accaggaacucgacccgcu

SEQ ID NO: 1357 - RNA, 19 nt, Artificial Sequence
  Description of Artificial Sequence: Target Sequence/siNA antisense region
cuucgccuucaucuccuug

SEQ ID NO: 1358 - RNA, 19 nt, Artificial Sequence
  Description of Artificial Sequence: Target Sequence/siNA antisense region
agcagucguucgugacaug

SEQ ID NO: 1359 - RNA, 19 nt, Artificial Sequence
  Description of Artificial Sequence: Target Sequence/siNA antisense region
ccaggaacucgacccgcug

SEQ ID NO: 1360 - RNA, 19 nt, Artificial Sequence
  Description of Artificial Sequence: Target Sequence/siNA antisense region
ugcccgucacguaguggaa

SEQ ID NO: 1361 - RNA, 19 nt, Artificial Sequence
  Description of Artificial Sequence: Target Sequence/siNA antisense region
gaggcaugaagccacccua

SEQ ID NO: 1362 - RNA, 19 nt, Artificial Sequence
  Description of Artificial Sequence: Target Sequence/siNA antisense region
agcaucgugcaguccugga

SEQ ID NO: 1363 - RNA, 19 nt, Artificial Sequence
  Description of Artificial Sequence: Target Sequence/siNA antisense region
augcccgucacguagugga

SEQ ID NO: 1364 - RNA, 19 nt, Artificial Sequence
  Description of Artificial Sequence: Target Sequence/siNA antisense region
ggcaugaagccacccuauu

SEQ ID NO: 1365 - RNA, 19 nt, Artificial Sequence
  Description of Artificial Sequence: Target Sequence/siNA antisense region
ucauagccuccgugaagac

SEQ ID NO: 1366 - RNA, 19 nt, Artificial Sequence
  Description of Artificial Sequence: Target Sequence/siNA antisense region
aggcaugaagccacccuau

SEQ ID NO: 1367 - RNA, 19 nt, Artificial Sequence
  Description of Artificial Sequence: Target Sequence/siNA antisense region
gucauagccuccgugaaga

SEQ ID NO: 1368 - RNA, 19 nt, Artificial Sequence
  Description of Artificial Sequence: Target Sequence/siNA antisense region
cccaaguuuccugaggcau

SEQ ID NO: 1369 - RNA, 19 nt, Artificial Sequence
  Description of Artificial Sequence: Target Sequence/siNA antisense region
uccuugagcacgucccggu

SEQ ID NO: 1370 - RNA, 19 nt, Artificial Sequence
  Description of Artificial Sequence: Target Sequence/siNA antisense region
ucauccacugcacagcccc

SEQ ID NO: 1371 - RNA, 19 nt, Artificial Sequence
  Description of Artificial Sequence: Target Sequence/siNA antisense region
ucgugcaguccuggagcuu

SEQ ID NO: 1372 - RNA, 19 nt, Artificial Sequence
  Description of Artificial Sequence: Target Sequence/siNA antisense region
caucgugcaguccuggagc

SEQ ID NO: 1373 - RNA, 19 nt, Artificial Sequence
  Description of Artificial Sequence: Target Sequence/siNA antisense region
ccuugagcacgucccggua

SEQ ID NO: 1374 - RNA, 19 nt, Artificial Sequence
  Description of Artificial Sequence: Target Sequence/siNA antisense region
uucauccacugcacagccc

SEQ ID NO: 1375 - RNA, 19 nt, Artificial Sequence
  Description of Artificial Sequence: Target Sequence/siNA antisense region
accgcccgggaacuugacg

SEQ ID NO: 1376 - RNA, 19 nt, Artificial Sequence
  Description of Artificial Sequence: Target Sequence/siNA antisense region
caugaagccacccuauuga

SEQ ID NO: 1377 - RNA, 19 nt, Artificial Sequence
  Description of Artificial Sequence: Target Sequence/siNA antisense region
cauagccuccgugaagacu

SEQ ID NO: 1378 - RNA, 19 nt, Artificial Sequence
  Description of Artificial Sequence: Target Sequence/siNA antisense region
agccgucuccgcuuggucc

SEQ ID NO: 1379 - RNA, 19 nt, Artificial Sequence
  Description of Artificial Sequence: Target Sequence/siNA antisense region
aggagcuuggacuggagcc

SEQ ID NO: 1380 - RNA, 19 nt, Artificial Sequence
  Description of Artificial Sequence: Target Sequence/siNA antisense region
guucauccacugcacagcc

SEQ ID NO: 1381 - RNA, 19 nt, Artificial Sequence
  Description of Artificial Sequence: Target Sequence/siNA antisense region
gcaucgugcaguccuggag

SEQ ID NO: 1382 - RNA, 19 nt, Artificial Sequence
  Description of Artificial Sequence: Target Sequence/siNA antisense region
auagccuccgugaagacuc

SEQ ID NO: 1383 - RNA, 19 nt, Artificial Sequence
  Description of Artificial Sequence: Target Sequence/siNA antisense region
ggagcuuggacuggagcca

SEQ ID NO: 1384 - RNA, 19 nt, Artificial Sequence
  Description of Artificial Sequence: Target Sequence/siNA antisense region
ucacguaguggaaaucccc

SEQ ID NO: 1385 - RNA, 19 nt, Artificial Sequence
  Description of Artificial Sequence: Target Sequence/siNA antisense region
ccaaguuuccugaggcaug

SEQ ID NO: 1386 - RNA, 19 nt, Artificial Sequence
  Description of Artificial Sequence: Target Sequence/siNA antisense region
augaagccacccuauugau

SEQ ID NO: 1387 - RNA, 19 nt, Artificial Sequence
  Description of Artificial Sequence: Target Sequence/siNA antisense region
aauaguaggcaaggcccgc

SEQ ID NO: 1388 - RNA, 19 nt, Artificial Sequence
  Description of Artificial Sequence: Target Sequence/siNA antisense region
cuccuugagcacgucccgg

SEQ ID NO: 1389 - RNA, 19 nt, Artificial Sequence
  Description of Artificial Sequence: Target Sequence/siNA antisense region
gcccaguuccccaccaugg

SEQ ID NO: 1390 - RNA, 19 nt, Artificial Sequence
  Description of Artificial Sequence: Target Sequence/siNA antisense region
gcaugaagccacccuauug

SEQ ID NO: 1391 - RNA, 19 nt, Artificial Sequence
  Description of Artificial Sequence: Target Sequence/siNA antisense region
aucgugcaguccuggagcu

SEQ ID NO: 1392 - RNA, 19 nt, Artificial Sequence
  Description of Artificial Sequence: Target Sequence/siNA antisense region
gaauaguaggcaaggcccg

SEQ ID NO: 1393 - RNA, 23 nt, Artificial Sequence
  Description of Artificial Sequence: Target Sequence/siNA sense region
gguccuuucuuggaucaacccgc

SEQ ID NO: 1394 - RNA, 23 nt, Artificial Sequence
  Description of Artificial Sequence: Target Sequence/siNA sense region
ugccccgggaggucucguagacc

SEQ ID NO: 1395 - RNA, 23 nt, Artificial Sequence
  Description of Artificial Sequence: Target Sequence/siNA sense region
ugcggaaccggugaguacaccgg

SEQ ID NO: 1396 - RNA, 23 nt, Artificial Sequence
  Description of Artificial Sequence: Target Sequence/siNA sense region
gcggaaccggugaguacaccgga

SEQ ID NO: 1397 - RNA, 23 nt, Artificial Sequence
  Description of Artificial Sequence: Target Sequence/siNA sense region
ccuugugguacugccugauaggg

SEQ ID NO: 1398 - RNA, 23 nt, Artificial Sequence
  Description of Artificial Sequence: Target Sequence/siNA sense region
cuugugguacugccugauagggu

SEQ ID NO: 1399 - RNA, 23 nt, Artificial Sequence
  Description of Artificial Sequence: Target Sequence/siNA sense region
uugugguacugccugauagggug

SEQ ID NO: 1400 - RNA, 23 nt, Artificial Sequence
  Description of Artificial Sequence: Target Sequence/siNA sense region
gugccccgggaggucucguagac

SEQ ID NO: 1401 - RNA, 23 nt, Artificial Sequence
  Description of Artificial Sequence: Target Sequence/siNA sense region
auaguggucugcggaaccgguga

SEQ ID NO: 1402 - RNA, 23 nt, Artificial Sequence
  Description of Artificial Sequence: Target Sequence/siNA sense region
gucugcggaaccggugaguacac

SEQ ID NO: 1403 - RNA, 23 nt, Artificial Sequence
  Description of Artificial Sequence: Target Sequence/siNA sense region
gccuugugguacugccugauagg

SEQ ID NO: 1404 - RNA, 23 nt, Artificial Sequence
  Description of Artificial Sequence: Target Sequence/siNA sense region
ugugguacugccugauagggugc

SEQ ID NO: 1405 - RNA, 23 nt, Artificial Sequence
  Description of Artificial Sequence: Target Sequence/siNA sense region
gugguacugccugauagggugcu

SEQ ID NO: 1406 - RNA, 23 nt, Artificial Sequence
  Description of Artificial Sequence: Target Sequence/siNA sense region
ugguacugccugauagggugcuu

SEQ ID NO: 1407 - RNA, 23 nt, Artificial Sequence
  Description of Artificial Sequence: Target Sequence/siNA sense region
gguacugccugauagggugcuug

SEQ ID NO: 1408 - RNA, 23 nt, Artificial Sequence
  Description of Artificial Sequence: Target Sequence/siNA sense region
uacugccugauagggugcuugcg

SEQ ID NO: 1409 - RNA, 23 nt, Artificial Sequence
  Description of Artificial Sequence: Target Sequence/siNA sense region
acugccugauagggugcuugcga

SEQ ID NO: 1410 - RNA, 23 nt, Artificial Sequence
  Description of Artificial Sequence: Target Sequence/siNA sense region
ugccugauagggugcuugcgagu

SEQ ID NO: 1411 - RNA, 23 nt, Artificial Sequence
  Description of Artificial Sequence: Target Sequence/siNA sense region
cugauagggugcuugcgagugcc

SEQ ID NO: 1412 - RNA, 23 nt, Artificial Sequence
  Description of Artificial Sequence: Target Sequence/siNA sense region
aaaggccuugugguacugccuga

SEQ ID NO: 1413 - RNA, 23 nt, Artificial Sequence
  Description of Artificial Sequence: Target Sequence/siNA sense region
ggguccuuucuuggaucaacccg

SEQ ID NO: 1414 - RNA, 23 nt, Artificial Sequence
  Description of Artificial Sequence: Target Sequence/siNA sense region
cggguccuuucuuggaucaaccc

SEQ ID NO: 1415 - RNA, 23 nt, Artificial Sequence
  Description of Artificial Sequence: Target Sequence/siNA sense region
gaccggguccuuucuuggaucaa

SEQ ID NO: 1416 - RNA, 23 nt, Artificial Sequence
  Description of Artificial Sequence: Target Sequence/siNA sense region
gccccgggaggucucguagaccg

SEQ ID NO: 1417 - RNA, 23 nt, Artificial Sequence
  Description of Artificial Sequence: Target Sequence/siNA sense region
ccccgggaggucucguagaccgu

SEQ ID NO: 1418 - RNA, 23 nt, Artificial Sequence
  Description of Artificial Sequence: Target Sequence/siNA sense region
cccgggaggucucguagaccgug

SEQ ID NO: 1419 - RNA, 23 nt, Artificial Sequence
  Description of Artificial Sequence: Target Sequence/siNA sense region
ccgggaggucucguagaccgugc

SEQ ID NO: 1420 - RNA, 23 nt, Artificial Sequence
  Description of Artificial Sequence: Target Sequence/siNA sense region
ucccgggagagccauaguggucu

SEQ ID NO: 1421 - RNA, 23 nt, Artificial Sequence
  Description of Artificial Sequence: Target Sequence/siNA sense region
cccgggagagccauaguggucug

SEQ ID NO: 1422 - RNA, 23 nt, Artificial Sequence
  Description of Artificial Sequence: Target Sequence/siNA sense region
ccgggagagccauaguggucugc

SEQ ID NO: 1423 - RNA, 23 nt, Artificial Sequence
  Description of Artificial Sequence: Target Sequence/siNA sense region
uaguggucugcggaaccggugag

SEQ ID NO: 1424 - RNA, 23 nt, Artificial Sequence
  Description of Artificial Sequence: Target Sequence/siNA sense region
aguggucugcggaaccggugagu

SEQ ID NO: 1425 - RNA, 23 nt, Artificial Sequence
  Description of Artificial Sequence: Target Sequence/siNA sense region
guggucugcggaaccggugagua

SEQ ID NO: 1426 - RNA, 23 nt, Artificial Sequence
  Description of Artificial Sequence: Target Sequence/siNA sense region
uggucugcggaaccggugaguac

SEQ ID NO: 1427 - RNA, 23 nt, Artificial Sequence
  Description of Artificial Sequence: Target Sequence/siNA sense region
ggucugcggaaccggugaguaca

SEQ ID NO: 1428 - RNA, 23 nt, Artificial Sequence
  Description of Artificial Sequence: Target Sequence/siNA sense region
ucugcggaaccggugaguacacc

SEQ ID NO: 1429 - RNA, 23 nt, Artificial Sequence
  Description of Artificial Sequence: Target Sequence/siNA sense region
cugcggaaccggugaguacaccg

SEQ ID NO: 1430 - RNA, 23 nt, Artificial Sequence
  Description of Artificial Sequence: Target Sequence/siNA sense region
cggaaccggugaguacaccggaa

SEQ ID NO: 1431 - RNA, 23 nt, Artificial Sequence
  Description of Artificial Sequence: Target Sequence/siNA sense region
ggaaccggugaguacaccggaau

SEQ ID NO: 1432 - RNA, 23 nt, Artificial Sequence
  Description of Artificial Sequence: Target Sequence/siNA sense region
gaaccggugaguacaccggaauu

SEQ ID NO: 1433 - RNA, 23 nt, Artificial Sequence
  Description of Artificial Sequence: Target Sequence/siNA sense region
aaccggugaguacaccggaauug

SEQ ID NO: 1434 - RNA, 23 nt, Artificial Sequence
  Description of Artificial Sequence: Target Sequence/siNA sense region
ucgcgaaaggccuugugguacug

SEQ ID NO: 1435 - RNA, 23 nt, Artificial Sequence
  Description of Artificial Sequence: Target Sequence/siNA sense region
cgcgaaaggccuugugguacugc

SEQ ID NO: 1436 - RNA, 23 nt, Artificial Sequence
  Description of Artificial Sequence: Target Sequence/siNA sense region
gcgaaaggccuugugguacugcc

SEQ ID NO: 1437 - RNA, 23 nt, Artificial Sequence
  Description of Artificial Sequence: Target Sequence/siNA sense region
cgaaaggccuugugguacugccu

SEQ ID NO: 1438 - RNA, 23 nt, Artificial Sequence
  Description of Artificial Sequence: Target Sequence/siNA sense region
gaaaggccuugugguacugccug

SEQ ID NO: 1439 - RNA, 23 nt, Artificial Sequence
  Description of Artificial Sequence: Target Sequence/siNA sense region
aaggccuugugguacugccugau

SEQ ID NO: 1440 - RNA, 23 nt, Artificial Sequence
  Description of Artificial Sequence: Target Sequence/siNA sense region
aggccuugugguacugccugaua

SEQ ID NO: 1441 - RNA, 23 nt, Artificial Sequence
  Description of Artificial Sequence: Target Sequence/siNA sense region
ggccuugugguacugccugauag

SEQ ID NO: 1442 - RNA, 23 nt, Artificial Sequence
  Description of Artificial Sequence: Target Sequence/siNA sense region
guacugccugauagggugcuugc

SEQ ID NO: 1443 - RNA, 23 nt, Artificial Sequence
  Description of Artificial Sequence: Target Sequence/siNA sense region
cugccugauagggugcuugcgag

SEQ ID NO: 1444 - RNA, 23 nt, Artificial Sequence
  Description of Artificial Sequence: Target Sequence/siNA sense region
gccugauagggugcuugcgagug

SEQ ID NO: 1445 - RNA, 23 nt, Artificial Sequence
  Description of Artificial Sequence: Target Sequence/siNA sense region
ccugauagggugcuugcgagugc

SEQ ID NO: 1446 - RNA, 23 nt, Artificial Sequence
  Description of Artificial Sequence: Target Sequence/siNA sense region
ugauagggugcuugcgagugccc

SEQ ID NO: 1447 - RNA, 23 nt, Artificial Sequence
  Description of Artificial Sequence: Target Sequence/siNA sense region
gauagggugcuugcgagugcccc

SEQ ID NO: 1448 - RNA, 23 nt, Artificial Sequence
  Description of Artificial Sequence: Target Sequence/siNA sense region
uagggugcuugcgagugccccgg

SEQ ID NO: 1449 - RNA, 23 nt, Artificial Sequence
  Description of Artificial Sequence: Target Sequence/siNA sense region
agggugcuugcgagugccccggg

SEQ ID NO: 1450 - RNA, 23 nt, Artificial Sequence
  Description of Artificial Sequence: Target Sequence/siNA sense region
gugcuugcgagugccccgggagg

SEQ ID NO: 1451 - RNA, 23 nt, Artificial Sequence
  Description of Artificial Sequence: Target Sequence/siNA sense region
ugcuugcgagugccccgggaggu

SEQ ID NO: 1452 - RNA, 23 nt, Artificial Sequence
  Description of Artificial Sequence: Target Sequence/siNA sense region
gcuugcgagugccccgggagguc

SEQ ID NO: 1453 - RNA, 23 nt, Artificial Sequence
  Description of Artificial Sequence: Target Sequence/siNA sense region
cuugcgagugccccgggaggucu

SEQ ID NO: 1454 - RNA, 23 nt, Artificial Sequence
  Description of Artificial Sequence: Target Sequence/siNA sense region
uugcgagugccccgggaggucuc

SEQ ID NO: 1455 - RNA, 23 nt, Artificial Sequence
  Description of Artificial Sequence: Target Sequence/siNA sense region
ugcgagugccccgggaggucucg

SEQ ID NO: 1456 - RNA, 23 nt, Artificial Sequence
  Description of Artificial Sequence: Target Sequence/siNA sense region
gcgagugccccgggaggucucgu

SEQ ID NO: 1457 - RNA, 23 nt, Artificial Sequence
  Description of Artificial Sequence: Target Sequence/siNA sense region
gagugccccgggaggucucguag

SEQ ID NO: 1458 - RNA, 23 nt, Artificial Sequence
  Description of Artificial Sequence: Target Sequence/siNA sense region
agugccccgggaggucucguaga

SEQ ID NO: 1459 - RNA, 23 nt, Artificial Sequence
  Description of Artificial Sequence: Target Sequence/siNA sense region
cgggaggucucguagaccgugca

SEQ ID NO: 1460 - RNA, 23 nt, Artificial Sequence
  Description of Artificial Sequence: Target Sequence/siNA sense region
uagccauggcguuaguaugagug

SEQ ID NO: 1461 - RNA, 23 nt, Artificial Sequence
  Description of Artificial Sequence: Target Sequence/siNA sense region
cccucccgggagagccauagugg

SEQ ID NO: 1462 - RNA, 46 nt, Artificial Sequence
  Description of Artificial Sequence: Target Sequence/siNA sense region
ccccgggaggucucguagaccguucgcgaaaggccuugugguacug

SEQ ID NO: 1463 - RNA, 46 nt, Artificial Sequence
  Description of Artificial Sequence: Target Sequence/siNA sense region
ccccgggaggucucguagaccguugauagggugcuugcgagugccc

SEQ ID NO: 1464 - RNA, 46 nt, Artificial Sequence
  Description of Artificial Sequence: Target Sequence/siNA sense region
ugauagggugcuugcgagugcccucgcgaaaggccuugugguacug

SEQ ID NO: 1465 - RNA, 46 nt, Artificial Sequence
  Description of Artificial Sequence: Target Sequence/siNA sense region
ccccgggaggucucguagaccgugccugauagggugcuugcgagug

SEQ ID NO: 1466 - RNA, 46 nt, Artificial Sequence
  Description of Artificial Sequence: Target Sequence/siNA sense region
gccugauagggugcuugcgagugucgcgaaaggccuugugguacug

SEQ ID NO: 1467 - RNA, 21 nt, Artificial Sequence
  Description of Artificial Sequence: Target Sequence/siNA STRAND region
  misc_feature (1)..(1): 5'-3 attached terminal deoxyabasic moiety, inverted abasic, inverted nucleotide or other terminal cap that is optionally present
  misc_feature (21)..(21): 3'-3 attached terminal deoxyabasic moiety, inverted abasic, inverted nucleotide or other terminal cap that is optionally present
gguccuuucuuggaucaaccc

SEQ ID NO: 1468 - RNA, 21 nt, Artificial Sequence
  Description of Artificial Sequence: Target Sequence/siNA STRAND region
  misc_feature (1)..(1): 5'-3 attached terminal deoxyabasic moiety, inverted abasic, inverted nucleotide or other terminal cap that is optionally present
  misc_feature (21)..(21): 3'-3 attached terminal deoxyabasic moiety, inverted abasic, inverted nucleotide or other terminal cap that is optionally present
ggguugauccaagaaaggacc

SEQ ID NO: 1469 - RNA, 21 nt, Artificial Sequence
  Description of Artificial Sequence: Target Sequence/siNA STRAND region
  misc_feature (1)..(1): 5'-3 attached terminal deoxyabasic moiety, inverted abasic, inverted nucleotide or other terminal cap that is optionally present
  misc_feature (21)..(21): 3'-3 attached terminal deoxyabasic moiety, inverted abasic, inverted nucleotide or other terminal cap that is optionally present
cccaacuagguucuuuccugg

SEQ ID NO: 1470 - RNA, 21 nt, Artificial Sequence
  Description of Artificial Sequence: Target Sequence/siNA STRAND region
  misc_feature (1)..(1): 5'-3 attached terminal deoxyabasic moiety, inverted abasic, inverted nucleotide or other terminal cap that is optionally present
  misc_feature (21)..(21): 3'-3 attached terminal deoxyabasic moiety, inverted abasic, inverted nucleotide or other terminal cap that is optionally present
ccaggaaagaaccuaguuggg

SEQ ID NO: 1471 - RNA, 23 nt, Artificial Sequence
  Description of Artificial Sequence: Target Sequence/siNA STRAND region
gguccuuucuuggaucaacccuu

SEQ ID NO: 1472 - RNA, 23 nt, Artificial Sequence
  Description of Artificial Sequence: Target Sequence/siNA STRAND region
ggguugauccaagaaaggaccuu

SEQ ID NO: 1473 - RNA, 23 nt, Artificial Sequence
  Description of Artificial Sequence: Target Sequence/siNA STRAND region
  misc_feature (1)..(1): 5'-3 attached terminal deoxyabasic moiety, inverted abasic, inverted nucleotide or other terminal cap that is optionally present
  misc_feature (23)..(23): 3'-3 attached terminal deoxyabasic moiety, inverted abasic, inverted nucleotide or other terminal cap that is optionally present
gguccuuucuuggaucaacccuu

SEQ ID NO: 1474 - RNA, 23 nt, Artificial Sequence
  Description of Artificial Sequence: Target Sequence/siNA STRAND region
  misc_feature (1)..(1): 5'-3 attached terminal deoxyabasic moiety, inverted abasic, inverted nucleotide or other terminal cap that is optionally present
  misc_feature (23)..(23): 3'-3 attached terminal deoxyabasic moiety, inverted abasic, inverted nucleotide or other terminal cap that is optionally present
ggguugauccaagaaaggaccuu

SEQ ID NO: 1475 - DNA, 21 bp, Artificial Sequence
  Description of Artificial Sequence: Target Sequence/siNA sense region (stab00)
  misc_feature (1)..(19): ribonucleotide unmodified or modified as described for this sequence
ccccgggaggucucguagatt

SEQ ID NO: 1476 - DNA, 21 bp, Artificial Sequence
  Description of Artificial Sequence: Target Sequence/siNA sense region (stab00)
  misc_feature (1)..(19): ribonucleotide unmodified or modified as described for this sequence
cggaaccggugaguacacctt

SEQ ID NO: 1477 - DNA, 21 bp, Artificial Sequence
  Description of Artificial Sequence: Target Sequence/siNA sense region (stab00)
  misc_feature (1)..(19): ribonucleotide unmodified or modified as described for this sequence
gccccgggaggucucguagtt

SEQ ID NO: 1478 - DNA, 21 bp, Artificial Sequence
  Description of Artificial Sequence: Target Sequence/siNA sense region (stab00)
  misc_feature (1)..(19): ribonucleotide unmodified or modified as described for this sequence
ggaaccggugaguacaccgtt

SEQ ID NO: 1479 - DNA, 21 bp, Artificial Sequence
  Description of Artificial Sequence: Target Sequence/siNA sense region (stab00)
  misc_feature (1)..(19): ribonucleotide unmodified or modified as described for this sequence
gugguacugccugauagggtt

SEQ ID NO: 1480 - DNA, 21 bp, Artificial Sequence
  Description of Artificial Sequence: Target Sequence/siNA sense region (stab00)
  misc_feature (1)..(19): ribonucleotide unmodified or modified as described for this sequence
ugugguacugccugauaggtt

SEQ ID NO: 1481 - DNA, 21 bp, Artificial Sequence
  Description of Artificial Sequence: Target Sequence/siNA sense region (stab00)
  misc_feature (1)..(19): ribonucleotide unmodified or modified as described for this sequence
uugugguacugccugauagtt

SEQ ID NO: 1482 - DNA, 21 bp, Artificial Sequence
  Description of Artificial Sequence: Target Sequence/siNA antisense region (stab00as)
  misc_feature (1)..(19): ribonucleotide unmodified or modified as described for this sequence
ucuacgagaccucccggggtt

SEQ ID NO: 1483 - DNA, 21 bp, Artificial Sequence
  Description of Artificial Sequence: Target Sequence/siNA antisense region (stab00as)
  misc_feature (1)..(19): ribonucleotide unmodified or modified as described for this sequence
gguguacucaccgguuccgtt

SEQ ID NO: 1484 - DNA, 21 bp, Artificial Sequence
  Description of Artificial Sequence: Target Sequence/siNA antisense region (stab00as)
  misc_feature (1)..(19): ribonucleotide unmodified or modified as described for this sequence
cuacgagaccucccggggctt

SEQ ID NO: 1485 - DNA, 21 bp, Artificial Sequence
  Description of Artificial Sequence: Target Sequence/siNA antisense region (stab00as)
  misc_feature (1)..(19): ribonucleotide unmodified or modified as described for this sequence
cgguguacucaccgguucctt

SEQ ID NO: 1486 - DNA, 21 bp, Artificial Sequence
  Description of Artificial Sequence: Target Sequence/siNA antisense region (stab00as)
  misc_feature (1)..(19): ribonucleotide unmodified or modified as described for this sequence
cccuaucaggcaguaccactt

SEQ ID NO: 1487 - DNA, 21 bp, Artificial Sequence
  Description of Artificial Sequence: Target Sequence/siNA antisense region (stab00as)
  misc_feature (1)..(19): ribonucleotide unmodified or modified as described for this sequence
ccuaucaggcaguaccacatt

SEQ ID NO: 1488 - DNA, 21 bp, Artificial Sequence
  Description of Artificial Sequence: Target Sequence/siNA antisense region (stab00as)
  misc_feature (1)..(19): ribonucleotide unmodified or modified as described for this sequence
cuaucaggcaguaccacaatt

SEQ ID NO: 1489 - DNA, 21 bp, Artificial Sequence
  Description of Artificial Sequence: Target Sequence/siNA sense region
  misc_feature (3)..(21): ribonucleotide unmodified or modified as described for this sequence
ttagaugcucuggagggcccc

SEQ ID NO: 1490 - DNA, 21 bp, Artificial Sequence
  Description of Artificial Sequence: Target Sequence/siNA sense region
  misc_feature (3)..(21): ribonucleotide unmodified or modified as described for this sequence
ttccacaugaguggccaaggc

SEQ ID NO: 1491 - DNA, 21 bp, Artificial Sequence
  Description of Artificial Sequence: Target Sequence/siNA sense region
  misc_feature (3)..(21): ribonucleotide unmodified or modified as described for this sequence
ttgaugcucuggagggccccg

SEQ ID NO: 1492 - DNA, 21 bp, Artificial Sequence
  Description of Artificial Sequence: Target Sequence/siNA sense region
  misc_feature (3)..(21): ribonucleotide unmodified or modified as described for this sequence
ttgccacaugaguggccaagg

SEQ ID NO: 1493 - DNA, 21 bp, Artificial Sequence
  Description of Artificial Sequence: Target Sequence/siNA sense region
  misc_feature (3)..(21): ribonucleotide unmodified or modified as described for this sequence
ttgggauaguccgucauggug

SEQ ID NO: 1494 - DNA, 21 bp, Artificial Sequence
  Description of Artificial Sequence: Target Sequence/siNA sense region
  misc_feature (3)..(21): ribonucleotide unmodified or modified as described for this sequence
ttggauaguccgucauggugu

SEQ ID NO: 1495 - DNA, 21 bp, Artificial Sequence
  Description of Artificial Sequence: Target Sequence/siNA sense region
  misc_feature (3)..(21): ribonucleotide unmodified or modified as described for this sequence
ttgauaguccgucaugguguu

SEQ ID NO: 1496 - DNA, 21 bp, Artificial Sequence
  Description of Artificial Sequence: Target Sequence/siNA antisense region
  misc_feature (3)..(21): ribonucleotide unmodified or modified as described for this sequence
ttggggcccuccagagcaucu

SEQ ID NO: 1497 - DNA, 21 bp, Artificial Sequence
  Description of Artificial Sequence: Target Sequence/siNA antisense region
  misc_feature (3)..(21): ribonucleotide unmodified or modified as described for this sequence
ttgccuuggccacucaugugg

SEQ ID NO: 1498 - DNA, 21 bp, Artificial Sequence
  Description of Artificial Sequence: Target Sequence/siNA antisense region
  misc_feature (3)..(21): ribonucleotide unmodified or modified as described for this sequence
ttcggggcccuccagagcauc

SEQ ID NO: 1499 - DNA, 21 bp, Artificial Sequence
  Description of Artificial Sequence: Target Sequence/siNA antisense region
  misc_feature (3)..(21): ribonucleotide unmodified or modified as described for this sequence
ttccuuggccacucauguggc

SEQ ID NO: 1500 - DNA, 21 bp, Artificial Sequence
  Description of Artificial Sequence: Target Sequence/siNA antisense region
  misc_feature (3)..(21): ribonucleotide unmodified or modified as described for this sequence
ttcaccaugacggacuauccc

SEQ ID NO: 1501 - DNA, 21 bp, Artificial Sequence
  Description of Artificial Sequence: Target Sequence/siNA antisense region
  misc_feature (3)..(21): ribonucleotide unmodified or modified as described for this sequence
ttacaccaugacggacuaucc

SEQ ID NO: 1502 - DNA, 21 bp, Artificial Sequence
  Description of Artificial Sequence: Target Sequence/siNA antisense region
  misc_feature (3)..(21): ribonucleotide unmodified or modified as described for this sequence
ttaacaccaugacggacuauc

SEQ ID NO: 1503 - RNA, 21 nt, Artificial Sequence
  Description of Artificial Sequence: Target Sequence/siNA sense region
cggaaccggugaguacaccgg

SEQ ID NO: 1504 - RNA, 21 nt, Artificial Sequence
  Description of Artificial Sequence: Target Sequence/siNA sense region
ggaaccggugaguacaccgga

SEQ ID NO: 1505 - RNA, 21 nt, Artificial Sequence
  Description of Artificial Sequence: Target Sequence/siNA sense region
uugugguacugccugauaggg

SEQ ID NO: 1506 - RNA, 21 nt, Artificial Sequence
  Description of Artificial Sequence: Target Sequence/siNA sense region
ugugguacugccugauagggu

SEQ ID NO: 1507 - RNA, 21 nt, Artificial Sequence
  Description of Artificial Sequence: Target Sequence/siNA sense region
gugguacugccugauagggug

SEQ ID NO: 1508 - RNA, 21 nt, Artificial Sequence
  Description of Artificial Sequence: Target Sequence/siNA sense region
gccccgggaggucucguagac

SEQ ID NO: 1509 - RNA, 21 nt, Artificial Sequence
  Description of Artificial Sequence: Target Sequence/siNA sense region
ccccgggaggucucguagacc

SEQ ID NO: 1510 - RNA, 21 nt, Artificial Sequence
  Description of Artificial Sequence: Target Sequence/siNA antisense region
gguguacucaccgguuccgca

SEQ ID NO: 1511 - RNA, 21 nt, Artificial Sequence
  Description of Artificial Sequence: Target Sequence/siNA antisense region
cgguguacucaccgguuccgc

SEQ ID NO: 1512 - RNA, 21 nt, Artificial Sequence
  Description of Artificial Sequence: Target Sequence/siNA antisense region
cuaucaggcaguaccacaagg

SEQ ID NO: 1513 - RNA, 21 nt, Artificial Sequence
  Description of Artificial Sequence: Target Sequence/siNA antisense region
ccuaucaggcaguaccacaag

SEQ ID NO: 1514 - RNA, 21 nt, Artificial Sequence
  Description of Artificial Sequence: Target Sequence/siNA antisense region
cccuaucaggcaguaccacaa

SEQ ID NO: 1515 - RNA, 21 nt, Artificial Sequence
  Description of Artificial Sequence: Target Sequence/siNA antisense region
cuacgagaccucccggggcac

SEQ ID NO: 1516 - RNA, 21 nt, Artificial Sequence
  Description of Artificial Sequence: Target Sequence/siNA antisense region
ucuacgagaccucccggggca

SEQ ID NO: 1517 - RNA, 21 nt, Artificial Sequence
  Description of Artificial Sequence: Target Sequence/siNA sense region
ggccacaugaguggccaaggc

SEQ ID NO: 1518 - RNA, 21 nt, Artificial Sequence
  Description of Artificial Sequence: Target Sequence/siNA sense region
aggccacaugaguggccaagg

SEQ ID NO: 1519 - RNA, 21 nt, Artificial Sequence
  Description of Artificial Sequence: Target Sequence/siNA sense region
gggauaguccgucaugguguu

SEQ ID NO: 1520 - RNA, 21 nt, Artificial Sequence
  Description of Artificial Sequence: Target Sequence/siNA sense region
ugggauaguccgucauggugu

SEQ ID NO: 1521 - RNA, 21 nt, Artificial Sequence
  Description of Artificial Sequence: Target Sequence/siNA sense region
gugggauaguccgucauggug

SEQ ID NO: 1522 - RNA, 21 nt, Artificial Sequence
  Description of Artificial Sequence: Target Sequence/siNA sense region
cagaugcucuggagggccccg

SEQ ID NO: 1523 - RNA, 21 nt, Artificial Sequence
  Description of Artificial Sequence: Target Sequence/siNA sense region
ccagaugcucuggagggcccc

SEQ ID NO: 1524 - RNA, 21 nt, Artificial Sequence
  Description of Artificial Sequence: Target Sequence/siNA antisense region
acgccuuggccacucaugugg

SEQ ID NO: 1525 - RNA, 21 nt, Artificial Sequence
  Description of Artificial Sequence: Target Sequence/siNA antisense region
cgccuuggccacucauguggc

SEQ ID NO: 1526 - RNA, 21 nt, Artificial Sequence
  Description of Artificial Sequence: Target Sequence/siNA antisense region
ggaacaccaugacggacuauc

SEQ ID NO: 1527 - RNA, 21 nt, Artificial Sequence
  Description of Artificial Sequence: Target Sequence/siNA antisense region
gaacaccaugacggacuaucc

SEQ ID NO: 1528 - RNA, 21 nt, Artificial Sequence
  Description of Artificial Sequence: Target Sequence/siNA antisense region
aacaccaugacggacuauccc

SEQ ID NO: 1529 - RNA, 21 nt, Artificial Sequence
  Description of Artificial Sequence: Target Sequence/siNA antisense region
cacggggcccuccagagcauc

SEQ ID NO: 1530 - RNA, 21 nt, Artificial Sequence
  Description of Artificial Sequence: Target Sequence/siNA antisense region
acggggcccuccagagcaucu

SEQ ID NO: 1531 - RNA, 21 nt, Artificial Sequence
  Description of Artificial Sequence: Target Sequence/siNA sense region
  misc_feature (1)..(1): 5'-3 attached terminal deoxyabasic moiety, inverted abasic, inverted nucleotide or other terminal cap that is optionally present
  misc_feature (21)..(21): 3'-3 attached terminal deoxyabasic moiety, inverted abasic, inverted nucleotide or other terminal cap that is optionally present
  misc_feature (1)..(1): Phosphorodithioate 3'-Internucleotide Linkage (optionally present)
  misc_feature (2)..(2): Phosphorodithioate 3'-Internucleotide Linkage (optionally present)
  misc_feature (3)..(3): Phosphorodithioate 3'-Internucleotide Linkage (optionally present)
  misc_feature (4)..(4): Phosphorodithioate 3'-Internucleotide Linkage (optionally present)
  misc_feature (5)..(5): Phosphorodithioate 3'-Internucleotide Linkage (optionally present)
  misc_feature (20)..(21): n stands for 5'-nitroindole
ccccgggaggucucguagann

SEQ ID NO: 1532 - RNA, 21 nt, Artificial Sequence
  Description of Artificial Sequence: Target Sequence/siNA sense region
  misc_feature (1)..(1): 5'-3 attached terminal deoxyabasic moiety, inverted abasic, inverted nucleotide or other terminal cap that is optionally present
  misc_feature (21)..(21): 3'-3 attached terminal deoxyabasic moiety, inverted abasic, inverted nucleotide or other terminal cap that is optionally present
  misc_feature (1)..(1): Phosphorodithioate 3'-Internucleotide Linkage (optionally present)
  misc_feature (2)..(2): Phosphorodithioate 3'-Internucleotide Linkage (optionally present)
  misc_feature (3)..(3): Phosphorodithioate 3'-Internucleotide Linkage (optionally present)
  misc_feature (4)..(4): Phosphorodithioate 3'-Internucleotide Linkage (optionally present)
  misc_feature (5)..(5): Phosphorodithioate 3'-Internucleotide Linkage (optionally present)
  misc_feature (20)..(21): n stands for 5'-nitroindole
agaugcucuggagggccccnn

SEQ ID NO: 1533 - RNA, 21 nt, Artificial Sequence
  Description of Artificial Sequence: Target Sequence/siNA antisense region
  misc_feature (21)..(21): 3'-3 attached terminal deoxyabasic moiety, inverted abasic, inverted nucleotide or other terminal cap that is optionally present
  misc_feature (1)..(1): Phosphorodithioate 3'-Internucleotide Linkage (optionally present)
  misc_feature (2)..(2): Phosphorodithioate 3'-Internucleotide Linkage (optionally present)
  misc_feature (3)..(3): Phosphorodithioate 3'-Internucleotide Linkage (optionally present)
  misc_feature (4)..(4): Phosphorodithioate 3'-Internucleotide Linkage (optionally present)
  misc_feature (5)..(5): Phosphorodithioate 3'-Internucleotide Linkage (optionally present)
  misc_feature (20)..(21): n stands for 5'-nitroindole
ucuacgagaccucccggggnn

SEQ ID NO: 1534 - RNA, 21 nt, Artificial Sequence
  Description of Artificial Sequence: Target Sequence/siNA antisense region
  misc_feature (21)..(21): 3'-3 attached terminal deoxyabasic moiety, inverted abasic, inverted nucleotide or other terminal cap that is optionally present
  misc_feature (1)..(1): Phosphorodithioate 3'-Internucleotide Linkage (optionally present)
  misc_feature (2)..(2): Phosphorodithioate 3'-Internucleotide Linkage (optionally present)
  misc_feature (3)..(3): Phosphorodithioate 3'-Internucleotide Linkage (optionally present)
  misc_feature (4)..(4): Phosphorodithioate 3'-Internucleotide Linkage (optionally present)
  misc_feature (5)..(5): Phosphorodithioate 3'-Internucleotide Linkage (optionally present)
  misc_feature (20)..(21): n stands for 5'-nitroindole
ggggcccuccagagcaucunn

SEQ ID NO: 1535 - RNA, 21 nt, Artificial Sequence
  Description of Artificial Sequence: Target Sequence/siNA sense region
  misc_feature (1)..(1): 5'-3 attached terminal deoxyabasic moiety, inverted abasic, inverted nucleotide or other terminal cap that is optionally present
  misc_feature (21)..(21): 3'-3 attached terminal deoxyabasic moiety, inverted abasic, inverted nucleotide or other terminal cap that is optionally present
  misc_feature (1)..(1): Phosphorodithioate 3'-Internucleotide Linkage (optionally present)
  misc_feature (2)..(2): Phosphorodithioate 3'-Internucleotide Linkage (optionally present)
  misc_feature (3)..(3): Phosphorodithioate 3'-Internucleotide Linkage (optionally present)
  misc_feature (4)..(4): Phosphorodithioate 3'-Internucleotide Linkage (optionally present)
  misc_feature (11)..(11): Phosphorodithioate 3'-Internucleotide Linkage (optionally present)
  misc_feature (12)..(12): Phosphorodithioate 3'-Internucleotide Linkage (optionally present)
  misc_feature (13)..(13): Phosphorodithioate 3'-Internucleotide Linkage (optionally present)
  misc_feature (14)..(14): Phosphorodithioate 3'-Internucleotide Linkage (optionally present)
  misc_feature (16)..(16): Phosphorodithioate 3'-Internucleotide Linkage (optionally present)
  misc_feature (20)..(21): n stands for 5'-nitroindole
ccccgggaggucucguagann

SEQ ID NO: 1536 - RNA, 21 nt, Artificial Sequence
  Description of Artificial Sequence: Target Sequence/siNA sense region
  misc_feature (1)..(1): 5'-3 attached terminal deoxyabasic moiety, inverted abasic, inverted nucleotide or other terminal cap that is optionally present
  misc_feature (21)..(21): 3'-3 attached terminal deoxyabasic moiety, inverted abasic, inverted nucleotide or other terminal cap that is optionally present
  misc_feature (4)..(4): Phosphorodithioate 3'-Internucleotide Linkage (optionally present)
  misc_feature (6)..(6): Phosphorodithioate 3'-Internucleotide Linkage (optionally present)
  misc_feature (7)..(7): Phosphorodithioate 3'-Internucleotide Linkage (optionally present)
  misc_feature (8)..(8): Phosphorodithioate 3'-Internucleotide Linkage (optionally present)
  misc_feature (9)..(9): Phosphorodithioate 3'-Internucleotide Linkage (optionally present)
  misc_feature (16)..(16): Phosphorodithioate 3'-Internucleotide Linkage (optionally present)
  misc_feature (17)..(17): Phosphorodithioate 3'-Internucleotide Linkage (optionally present)
  misc_feature (18)..(18): Phosphorodithioate 3'-Internucleotide Linkage (optionally present)
  misc_feature (19)..(19): Phosphorodithioate 3'-Internucleotide Linkage (optionally present)
  misc_feature (20)..(21): n stands for 5'-nitroindole
agaugcucuggagggccccnn

SEQ ID NO: 1537 - RNA, 21 nt, Artificial Sequence
  Description of Artificial Sequence: Target Sequence/siNA antisense region
  misc_feature (21)..(21): 3'-3 attached terminal deoxyabasic moiety, inverted abasic, inverted nucleotide or other terminal cap that is optionally present
  misc_feature (1)..(1): Phosphorodithioate 3'-Internucleotide Linkage (optionally present)
  misc_feature (2)..(2): Phosphorodithioate 3'-Internucleotide Linkage (optionally present)
  misc_feature (3)..(3): Phosphorodithioate 3'-Internucleotide Linkage (optionally present)
  misc_feature (5)..(5): Phosphorodithioate 3'-Internucleotide Linkage (optionally present)
  misc_feature (10)..(10): Phosphorodithioate 3'-Internucleotide Linkage (optionally present)
  misc_feature (11)..(11): Phosphorodithioate 3'-Internucleotide Linkage (optionally present)
  misc_feature (12)..(12): Phosphorodithioate 3'-Internucleotide Linkage (optionally present)
  misc_feature (13)..(13): Phosphorodithioate 3'-Internucleotide Linkage (optionally present)
  misc_feature (14)..(14): Phosphorodithioate 3'-Internucleotide Linkage (optionally present)
  misc_feature (15)..(15): Phosphorodithioate 3'-Internucleotide Linkage (optionally present)
  misc_feature (20)..(21): n stands for 5'-nitroindole
ucuacgagaccucccggggnn

SEQ ID NO: 1538 - RNA, 21 nt, Artificial Sequence
  Description of Artificial Sequence: Target Sequence/siNA antisense region
  misc_feature (21)..(21): 3'-3 attached terminal deoxyabasic moiety, inverted abasic, inverted nucleotide or other terminal cap that is optionally present
  misc_feature (5)..(5): Phosphorodithioate 3'-Internucleotide Linkage (optionally present)
  misc_feature (6)..(6): Phosphorodithioate 3'-Internucleotide Linkage (optionally present)
  misc_feature (7)..(7): Phosphorodithioate 3'-Internucleotide Linkage (optionally present)
  misc_feature (8)..(8): Phosphorodithioate 3'-Internucleotide Linkage (optionally present)
  misc_feature (9)..(9): Phosphorodithioate 3'-Internucleotide Linkage (optionally present)
  misc_feature (10)..(10): Phosphorodithioate 3'-Internucleotide Linkage (optionally present)
  misc_feature (15)..(15): Phosphorodithioate 3'-Internucleotide Linkage (optionally present)
  misc_feature (17)..(17): Phosphorodithioate 3'-Internucleotide Linkage (optionally present)
  misc_feature (18)..(18): Phosphorodithioate 3'-Internucleotide Linkage (optionally present)
  misc_feature (19)..(19): Phosphorodithioate 3'-Internucleotide Linkage (optionally present)
  misc_feature (20)..(21): n stands for 5'-nitroindole
ggggcccuccagagcaucunn

SEQ ID NO: 1539 - RNA, 21 nt, Artificial Sequence
  Description of Artificial Sequence: Target Sequence/siNA sense region
  misc_feature (1)..(1): 5'-3 attached terminal deoxyabasic moiety, inverted abasic, inverted nucleotide or other terminal cap that is optionally present
  misc_feature (21)..(21): 3'-3 attached terminal deoxyabasic moiety, inverted abasic, inverted nucleotide or other terminal cap that is optionally present
  misc_feature (1)..(1): 2'-deoxy-2'Fluoro
  misc_feature (1)..(1): Phosphorodithioate 3'-Internucleotide Linkage (optionally present)
  misc_feature (2)..(2): 2'-deoxy-2'Fluoro
  misc_feature (2)..(2): Phosphorodithioate 3'-Internucleotide Linkage (optionally present)
  misc_feature (3)..(3): 2'-deoxy-2'Fluoro
  misc_feature (3)..(3): Phosphorodithioate 3'-Internucleotide Linkage (optionally present)
  misc_feature (4)..(4): 2'-deoxy-2'Fluoro
  misc_feature (4)..(4): Phosphorodithioate 3'-Internucleotide Linkage (optionally present)
  misc_feature (11)..(14): 2'-deoxy-2'Fluoro
  misc_feature (16)..(16): 2'-deoxy-2'Fluoro
  misc_feature (17)..(17): Phosphorodithioate 3'-Internucleotide Linkage (optionally present)
  misc_feature (18)..(18): Phosphorodithioate 3'-Internucleotide Linkage (optionally present)
  misc_feature (19)..(19): Phosphorodithioate 3'-Internucleotide Linkage (optionally present)
  misc_feature (1)..(19): ribonucleotide unmodified or modified as described for this sequence
  misc_feature (20)..(21): n stands for 5'-nitroindole
ccccgggaggucucguagann

SEQ ID NO: 1540 - RNA, 21 nt, Artificial Sequence
  Description of Artificial Sequence: Target Sequence/siNA sense region
  misc_feature (1)..(1): 5'-3 attached terminal deoxyabasic moiety, inverted abasic, inverted nucleotide or other terminal cap that is optionally present
  misc_feature (21)..(21): 3'-3 attached terminal deoxyabasic moiety, inverted abasic, inverted nucleotide or other terminal cap that is optionally present
  misc_feature (1)..(1): Phosphorodithioate 3'-Internucleotide Linkage (optionally present)
  misc_feature (2)..(2): Phosphorodithioate 3'-Internucleotide Linkage (optionally present)
  misc_feature (3)..(3): Phosphorodithioate 3'-Internucleotide Linkage (optionally present)
  misc_feature (4)..(4): 2'-deoxy-2'Fluoro
  misc_feature (4)..(4): Phosphorodithioate 3'-Internucleotide Linkage (optionally present)
  misc_feature (6)..(9): 2'-deoxy-2'Fluoro
  misc_feature (16)..(17): 2'-deoxy-2'Fluoro
  misc_feature (17)..(17): Phosphorodithioate 3'-Internucleotide Linkage (optionally present)
  misc_feature (18)..(18): 2'-deoxy-2'Fluoro
  misc_feature (18)..(18): Phosphorodithioate 3'-Internucleotide Linkage (optionally present)
  misc_feature (19)..(19): 2'-deoxy-2'Fluoro
  misc_feature (19)..(19): Phosphorodithioate 3'-Internucleotide Linkage (optionally present)
  misc_feature (1)..(19): ribonucleotide unmodified or modified as described for this sequence
  misc_feature (20)..(21): n stands for 5'-nitroindole
agaugcucuggagggccccnn

SEQ ID NO: 1541 - RNA, 21 nt, Artificial Sequence
  Description of Artificial Sequence: Target Sequence/siNA sense region
  misc_feature (1)..(1): 5'-3 attached terminal deoxyabasic moiety, inverted abasic, inverted nucleotide or other terminal cap that is optionally present
  misc_feature (21)..(21): 3'-3 attached terminal deoxyabasic moiety, inverted abasic, inverted nucleotide or other terminal cap that is optionally present
  misc_feature (1)..(4): 2'-deoxy-2'Fluoro
  misc_feature (11)..(14): 2'-deoxy-2'Fluoro
  misc_feature (16)..(16): 2'-deoxy-2'Fluoro
  misc_feature (1)..(19): ribonucleotide unmodified or modified as described for this sequence
  misc_feature (20)..(21): n stands for 5'-nitroindole
ccccgggaggucucguagann

SEQ ID NO: 1542 - RNA, 21 nt, Artificial Sequence
  Description of Artificial Sequence: Target Sequence/siNA sense region
  misc_feature (1)..(1): 5'-3 attached terminal deoxyabasic moiety, inverted abasic, inverted nucleotide or other terminal cap that is optionally present
  misc_feature (21)..(21): 3'-3 attached terminal deoxyabasic moiety, inverted abasic, inverted nucleotide or other terminal cap that is optionally present
  misc_feature (4)..(4): 2'-deoxy-2'Fluoro
  misc_feature (6)..(9): 2'-deoxy-2'Fluoro
  misc_feature (16)..(19): 2'-deoxy-2'Fluoro
  misc_feature (1)..(19): ribonucleotide unmodified or modified as described for this sequence
  misc_feature (20)..(21): n stands for 5'-nitroindole
agaugcucuggagggccccnn

SEQ ID NO: 1543 - RNA, 21 nt, Artificial Sequence
  Description of Artificial Sequence: Target Sequence/siNA antisense region
  misc_feature (1)..(1): 5'-3 attached terminal deoxyabasic moiety, inverted abasic, inverted nucleotide or other terminal cap that is optionally present
  misc_feature (21)..(21): 3'-3 attached terminal deoxyabasic moiety, inverted abasic, inverted nucleotide or other terminal cap that is optionally present
  misc_feature (1)..(1): Phosphorodithioate 3'-Internucleotide Linkage (optionally present)
  misc_feature (2)..(2): Phosphorodithioate 3'-Internucleotide Linkage (optionally present)
  misc_feature (3)..(3): Phosphorodithioate 3'-Internucleotide Linkage (optionally present)
  misc_feature (5)..(5): Phosphorodithioate 3'-Internucleotide Linkage (optionally present)
  misc_feature (10)..(10): Phosphorodithioate 3'-Internucleotide Linkage (optionally present)
  misc_feature (11)..(11): Phosphorodithioate 3'-Internucleotide Linkage (optionally present)
  misc_feature (12)..(12): Phosphorodithioate 3'-Internucleotide Linkage (optionally present)
  misc_feature (13)..(13): Phosphorodithioate 3'-Internucleotide Linkage (optionally present)
  misc_feature (14)..(14): Phosphorodithioate 3'-Internucleotide Linkage (optionally present)
  misc_feature (15)..(15): Phosphorodithioate 3'-Internucleotide Linkage (optionally present)
  misc_feature (20)..(21): n stands for 5'-nitroindole
ucuacgagaccucccggggnn

SEQ ID NO: 1544 - RNA, 19 nt, Artificial Sequence
  Description of Artificial Sequence: Target Sequence/siNA antisense region
  misc_feature (1)..(3): 2'-deoxy-2'Fluoro
  misc_feature (5)..(5): 2'-deoxy-2'Fluoro
  misc_feature (10)..(15): 2'-deoxy-2'Fluoro
ucuacgagaccucccgggg

SEQ ID NO: 1545 - RNA, 21 nt, Artificial Sequence
  Description of Artificial Sequence: Target Sequence/siNA antisense region
  misc_feature (1)..(3): 2'-deoxy-2'Fluoro
  misc_feature (5)..(5): 2'-deoxy-2'Fluoro
  misc_feature (10)..(15): 2'-deoxy-2'Fluoro
  misc_feature (1)..(19): ribonucleotide unmodified or modified as described for this sequence
  misc_feature (20)..(21): n stands for 5'-nitroindole
ucuacgagaccucccggggnn

SEQ ID NO: 1546 - RNA, 21 nt, Artificial Sequence
  Description of Artificial Sequence: Target Sequence/siNA antisense region
  misc_feature (5)..(10): 2'-deoxy-2'Fluoro
  misc_feature (15)..(15): 2'-deoxy-2'Fluoro
  misc_feature (17)..(19): 2'-deoxy-2'Fluoro
  misc_feature (1)..(19): ribonucleotide unmodified or modified as described for this sequence
  misc_feature (20)..(21): n stands for 5'-nitroindole
ggggcccuccagagcaucunn

SEQ ID NO: 1547 - RNA, 21 nt, Artificial Sequence
  Description of Artificial Sequence: Target Sequence/siNA antisense region
  misc_feature (1)..(1): 5'-3 attached terminal deoxyabasic moiety, inverted abasic, inverted nucleotide or other terminal cap that is optionally present
  misc_feature (21)..(21): 3'-3 attached terminal deoxyabasic moiety, inverted abasic, inverted nucleotide or other terminal cap that is optionally present
  misc_feature (1)..(3): 2'-deoxy-2'Fluoro
  misc_feature (5)..(5): 2'-deoxy-2'Fluoro
  misc_feature (10)..(15): 2'-deoxy-2'Fluoro
  misc_feature (1)..(19): ribonucleotide unmodified or modified as described for this sequence
  misc_feature (20)..(21): n stands for 5'-nitroindole
ucuacgagaccucccggggnn

SEQ ID NO: 1548 - RNA, 21 nt, Artificial Sequence
  Description of Artificial Sequence: Target Sequence/siNA sense region
  misc_feature (21)..(21): 3'-3 attached terminal deoxyabasic moiety, inverted abasic, inverted nucleotide or other terminal cap that is optionally present
  misc_feature (1)..(1): Phosphorothioate or Phosphorodithioate 3'-Internucleotide Linkage (optionally present)
  misc_feature (2)..(2): Phosphorothioate or Phosphorodithioate 3'-Internucleotide Linkage (optionally present)
  misc_feature (3)..(3): Phosphorothioate or Phosphorodithioate 3'-Internucleotide Linkage (optionally present)
  misc_feature (4)..(4): Phosphorothioate or Phosphorodithioate 3'-Internucleotide Linkage (optionally present)
  misc_feature (11)..(11): Phosphorothioate or Phosphorodithioate 3'-Internucleotide Linkage (optionally present)
  misc_feature (12)..(12): Phosphorothioate or Phosphorodithioate 3'-Internucleotide Linkage (optionally present)
  misc_feature (13)..(13): Phosphorothioate or Phosphorodithioate 3'-Internucleotide Linkage (optionally present)
  misc_feature (14)..(14): Phosphorothioate or Phosphorodithioate 3'-Internucleotide Linkage (optionally present)
  misc_feature (16)..(16): Phosphorothioate or Phosphorodithioate 3'-Internucleotide Linkage (optionally present)
  misc_feature (20)..(21): n stands for 5'-nitroindole
ccccgggaggucucguagann

SEQ ID NO: 1549 - RNA, 21 nt, Artificial Sequence
  Description of Artificial Sequence: Target Sequence/siNA sense region
  misc_feature (21)..(21): 3'-3 attached terminal deoxyabasic moiety, inverted abasic, inverted nucleotide or other terminal cap that is optionally present
ccccgggaggucucguagacc

SEQ ID NO: 1550 - RNA, 21 nt, Artificial Sequence
  Description of Artificial Sequence: Target Sequence/siNA sense region
  misc_feature (1)..(1): 5'-3 attached terminal deoxyabasic moiety, inverted abasic, inverted nucleotide or other terminal cap that is optionally present
  misc_feature (21)..(21): 3'-3 attached terminal deoxyabasic moiety, inverted abasic, inverted nucleotide or other terminal cap that is optionally present
ccccgggaggucucguagacc

SEQ ID NO: 1551 - RNA, 21 nt, Artificial Sequence
  Description of Artificial Sequence: Target Sequence/siNA antisense region
  misc_feature (21)..(21): 3'-3 attached terminal deoxyabasic moiety, inverted abasic, inverted nucleotide or other terminal cap that is optionally present
ucuacgagaccucccggggca

SEQ ID NO: 1552 - RNA, 21 nt, Artificial Sequence
  Description of Artificial Sequence: Target Sequence/siNA antisense region
  misc_feature (1)..(1): 5'-3 attached terminal deoxyabasic moiety, inverted abasic, inverted nucleotide or other terminal cap that is optionally present
  misc_feature (21)..(21): 3'-3 attached terminal deoxyabasic moiety, inverted abasic, inverted nucleotide or other terminal cap that is optionally present
ucuacgagaccucccggggca

SEQ ID NO: 1553 - DNA, 21 bp, Artificial Sequence
  Description of Artificial Sequence: Target Sequence/siNA sense region (stab06)
  misc_feature (1)..(1): 5'-3 attached terminal deoxyabasic moiety, inverted abasic, inverted nucleotide or other terminal cap that is optionally present
  misc_feature (21)..(21): 3'-3 attached terminal deoxyabasic moiety, inverted abasic, inverted nucleotide or other terminal cap that is optionally present
  misc_feature (1)..(4): 2'-deoxy-2'Fluoro
  misc_feature (11)..(14): 2'-deoxy-2'Fluoro
  misc_feature (16)..(16): 2'-deoxy-2'Fluoro
  misc_feature (1)..(19): ribonucleotide unmodified or modified as described for this sequence
ccccgggaggucucguagatt

SEQ ID NO: 1554 - DNA, 21 bp, Artificial Sequence
  Description of Artificial Sequence: Target Sequence/siNA antisense region
  misc_feature (20)..(20): Phosphorothioate or Phosphorodithioate 3'-Internucleotide Linkage (optionally present)
  misc_feature (1)..(3): 2'-deoxy-2'Fluoro
  misc_feature (5)..(5): 2'-deoxy-2'Fluoro
  misc_feature (10)..(15): 2'-deoxy-2'Fluoro
  misc_feature (1)..(19): ribonucleotide unmodified or modified as described for this sequence
ucuacgagaccucccggggtt

SEQ ID NO: 1555 - DNA, 21 bp, Artificial Sequence
  Description of Artificial Sequence: Target Sequence/siNA sense region (stab07)
  misc_feature (1)..(1): 5'-3 attached terminal deoxyabasic moiety, inverted abasic, inverted nucleotide or other terminal cap that is optionally present
  misc_feature (21)..(21): 3'-3 attached terminal deoxyabasic moiety, inverted abasic, inverted nucleotide or other terminal cap that is optionally present
  misc_feature (1)..(2): 2'-deoxy
  misc_feature (3)..(3): 2'-deoxy-2'Fluoro
  misc_feature (4)..(5): 2'-deoxy
  misc_feature (6)..(8): 2'-deoxy-2'Fluoro
  misc_feature (9)..(9): 2'-deoxy
  misc_feature (10)..(10): 2'-deoxy-2'Fluoro
  misc_feature (11)..(14): 2'-deoxy
  misc_feature (15)..(16): 2'-deoxy-2'Fluoro
  misc_feature (17)..(18): 2'-deoxy
  misc_feature (19)..(19): 2'-deoxy-2'Fluoro
  misc_feature (1)..(19): ribonucleotide unmodified or modified as described for this sequence
aguggucugcggaaccggutt

SEQ ID NO: 1556 - DNA, 21 bp, Artificial Sequence
  Description of Artificial Sequence: Target Sequence/siNA sense region (stab07)
  misc_feature (1)..(1): 5'-3 attached terminal deoxyabasic moiety, inverted abasic, inverted nucleotide or other terminal cap that is optionally present
  misc_feature (21)..(21): 3'-3 attached terminal deoxyabasic moiety, inverted abasic, inverted nucleotide or other terminal cap that is optionally present
  misc_feature (1)..(2): 2'-deoxy-2'Fluoro
  misc_feature (3)..(3): 2'-deoxy
  misc_feature (4)..(4): 2'-deoxy-2'Fluoro
  misc_feature (5)..(8): 2'-deoxy
  misc_feature (9)..(10): 2'-deoxy-2'Fluoro
  misc_feature (11)..(12): 2'-deoxy
  misc_feature (13)..(13): 2'-deoxy-2'Fluoro
  misc_feature (14)..(16): 2'-deoxy
  misc_feature (17)..(17): 2'-deoxy-2'Fluoro
  misc_feature (18)..(18): 2'-deoxy
  misc_feature (19)..(19): 2'-deoxy-2'Fluoro
  misc_feature (1)..(19): ribonucleotide unmodified or modified as described for this sequence
cugcggaaccggugaguactt

SEQ ID NO: 1557 - DNA, 21 bp, Artificial Sequence
  Description of Artificial Sequence: Target Sequence/siNA sense region (stab07)
  misc_feature (1)..(1): 5'-3 attached terminal deoxyabasic moiety, inverted abasic, inverted nucleotide or other terminal cap that is optionally present
  misc_feature (21)..(21): 3'-3 attached terminal deoxyabasic moiety, inverted abasic, inverted nucleotide or other terminal cap that is optionally present
  misc_feature (1)..(3): 2'-deoxy-2'Fluoro
  misc_feature (4)..(4): 2'-deoxy
  misc_feature (5)..(5): 2'-deoxy-2'Fluoro
  misc_feature (6)..(7): 2'-deoxy
  misc_feature (8)..(8): 2'-deoxy-2'Fluoro
  misc_feature (9)..(9): 2'-deoxy
  misc_feature (10)..(11): 2'-deoxy-2'Fluoro
  misc_feature (12)..(12): 2'-deoxy
  misc_feature (13)..(15): 2'-deoxy-2'Fluoro
  misc_feature (16)..(17): 2'-deoxy
  misc_feature (18)..(18): 2'-deoxy-2'Fluoro
  misc_feature (19)..(19): 2'-deoxy
  misc_feature (1)..(19): ribonucleotide unmodified or modified as described for this sequence
cuugugguacugccugauatt

SEQ ID NO: 1558 - DNA, 21 bp, Artificial Sequence
  Description of Artificial Sequence: Target Sequence/siNA sense region (stab07)
  misc_feature (1)..(1): 5'-3 attached terminal deoxyabasic moiety, inverted abasic, inverted nucleotide or other terminal cap that is optionally present
  misc_feature (21)..(21): 3'-3 attached terminal deoxyabasic moiety, inverted abasic, inverted nucleotide or other terminal cap that is optionally present
  misc_feature (1)..(1): 2'-deoxy-2'Fluoro
  misc_feature (2)..(3): 2'-deoxy
  misc_feature (4)..(4): 2'-deoxy-2'Fluoro
  misc_feature (5)..(5): 2'-deoxy
  misc_feature (6)..(7): 2'-deoxy-2'Fluoro
  misc_feature (8)..(8): 2'-deoxy
  misc_feature (9)..(11): 2'-deoxy-2'Fluoro
  misc_feature (12)..(13): 2'-deoxy
  misc_feature (14)..(14): 2'-deoxy-2'Fluoro
  misc_feature (15)..(18): 2'-deoxy
  misc_feature (19)..(19): 2'-deoxy-2'Fluoro
  misc_feature (1)..(19): ribonucleotide unmodified or modified as described for this sequence
ugguacugccugauagggutt

SEQ ID NO: 1559 - DNA, 21 bp, Artificial Sequence
  Description of Artificial Sequence: Target Sequence/siNA sense region (stab07)
  misc_feature (1)..(1): 5'-3 attached terminal deoxyabasic moiety, inverted abasic, inverted nucleotide or other terminal cap that is optionally present
  misc_feature (21)..(21): 3'-3 attached terminal deoxyabasic moiety, inverted abasic, inverted nucleotide or other terminal cap that is optionally present
  misc_feature (1)..(2): 2'-deoxy
  misc_feature (3)..(3): 2'-deoxy-2'Fluoro
  misc_feature (4)..(4): 2'-deoxy
  misc_feature (5)..(6): 2'-deoxy-2'Fluoro
  misc_feature (7)..(7): 2'-deoxy
  misc_feature (8)..(10): 2'-deoxy-2'Fluoro
  misc_feature (11)..(12): 2'-deoxy
  misc_feature (13)..(13): 2'-deoxy-2'Fluoro
  misc_feature (14)..(17): 2'-deoxy
  misc_feature (18)..(18): 2'-deoxy-2'Fluoro
  misc_feature (19)..(19): 2'-deoxy
  misc_feature (1)..(19): ribonucleotide unmodified or modified as described for this sequence
gguacugccugauagggugtt

SEQ ID NO: 1560 - DNA, 21 bp, Artificial Sequence
  Description of Artificial Sequence: Target Sequence/siNA sense region (stab07)
  misc_feature (1)..(1): 5'-3 attached terminal deoxyabasic moiety, inverted abasic, inverted nucleotide or other terminal cap that is optionally present
  misc_feature (21)..(21): 3'-3 attached terminal deoxyabasic moiety, inverted abasic, inverted nucleotide or other terminal cap that is optionally present
  misc_feature (1)..(1): 2'-deoxy
  misc_feature (2)..(2): 2'-deoxy-2'Fluoro
  misc_feature (3)..(3): 2'-deoxy
  misc_feature (4)..(5): 2'-deoxy-2'Fluoro
  misc_feature (6)..(6): 2'-deoxy
  misc_feature (7)..(9): 2'-deoxy-2'Fluoro
  misc_feature (10)..(11): 2'-deoxy
  misc_feature (12)..(12): 2'-deoxy-2'Fluoro
  misc_feature (13)..(16): 2'-deoxy
  misc_feature (17)..(17): 2'-deoxy-2'Fluoro
  misc_feature (18)..(18): 2'-deoxy
  misc_feature (19)..(19): 2'-deoxy-2'Fluoro
  misc_feature (1)..(19): ribonucleotide unmodified or modified as described for this sequence
guacugccugauagggugctt

SEQ ID NO: 1561 - DNA, 21 bp, Artificial Sequence
  Description of Artificial Sequence: Target Sequence/siNA sense region (stab07)
  misc_feature (1)..(1): 5'-3 attached terminal deoxyabasic moiety, inverted abasic, inverted nucleotide or other terminal cap that is optionally present
  misc_feature (21)..(21): 3'-3 attached terminal deoxyabasic moiety, inverted abasic, inverted nucleotide or other terminal cap that is optionally present
  misc_feature (1)..(1): 2'-deoxy-2'Fluoro
  misc_feature (2)..(2): 2'-deoxy
  misc_feature (3)..(4): 2'-deoxy-2'Fluoro
  misc_feature (5)..(5): 2'-deoxy
  misc_feature (6)..(8): 2'-deoxy-2'Fluoro
  misc_feature (9)..(10): 2'-deoxy
  misc_feature (11)..(11): 2'-deoxy-2'Fluoro
  misc_feature (12)..(15): 2'-deoxy
  misc_feature (16)..(16): 2'-deoxy-2'Fluoro
  misc_feature (17)..(17): 2'-deoxy
  misc_feature (18)..(19): 2'-deoxy-2'Fluoro
  misc_feature (1)..(19): ribonucleotide unmodified or modified as described for this sequence
uacugccugauagggugcutt

SEQ ID NO: 1562 - DNA, 21 bp, Artificial Sequence
  Description of Artificial Sequence: Target Sequence/siNA sense region (stab07)
  misc_feature (1)..(1): 5'-3 attached terminal deoxyabasic moiety, inverted abasic, inverted nucleotide or other terminal cap that is optionally present
  misc_feature (21)..(21): 3'-3 attached terminal deoxyabasic moiety, inverted abasic, inverted nucleotide or other terminal cap that is optionally present
  misc_feature (1)..(2): 2'-deoxy-2'Fluoro
  misc_feature (3)..(3): 2'-deoxy
  misc_feature (4)..(6): 2'-deoxy-2'Fluoro
  misc_feature (7)..(8): 2'-deoxy
  misc_feature (9)..(9): 2'-deoxy-2'Fluoro
  misc_feature (10)..(13): 2'-deoxy
  misc_feature (14)..(14): 2'-deoxy-2'Fluoro
  misc_feature (15)..(15): 2'-deoxy
  misc_feature (16)..(18): 2'-deoxy-2'Fluoro
  misc_feature (19)..(19): 2'-deoxy
  misc_feature (1)..(19): ribonucleotide unmodified or modified as described for this sequence
cugccugauagggugcuugtt

SEQ ID NO: 1563 - DNA, 21 bp, Artificial Sequence
  Description of Artificial Sequence: Target Sequence/siNA sense region (stab07)
  misc_feature (1)..(1): 5'-3 attached terminal deoxyabasic moiety, inverted abasic, inverted nucleotide or other terminal cap that is optionally present
  misc_feature (21)..(21): 3'-3 attached terminal deoxyabasic moiety, inverted abasic, inverted nucleotide or other terminal cap that is optionally present
  misc_feature (1)..(1): 2'-deoxy-2'Fluoro
  misc_feature (2)..(2): 2'-deoxy
  misc_feature (3)..(5): 2'-deoxy-2'Fluoro
  misc_feature (6)..(7): 2'-deoxy
  misc_feature (8)..(8): 2'-deoxy-2'Fluoro
  misc_feature (9)..(12): 2'-deoxy
  misc_feature (13)..(13): 2'-deoxy-2'Fluoro
  misc_feature (14)..(14): 2'-deoxy
  misc_feature (15)..(17): 2'-deoxy-2'Fluoro
  misc_feature (18)..(18): 2'-deoxy
  misc_feature (19)..(19): 2'-deoxy-2'Fluoro
  misc_feature (1)..(19): ribonucleotide unmodified or modified as described for this sequence
ugccugauagggugcuugctt

SEQ ID NO: 1564 - DNA, 21 bp, Artificial Sequence
  Description of Artificial Sequence: Target Sequence/siNA sense region (stab07)
  misc_feature (1)..(1): 5'-3 attached terminal deoxyabasic moiety, inverted abasic, inverted nucleotide or other terminal cap that is optionally present
  misc_feature (21)..(21): 3'-3 attached terminal deoxyabasic moiety, inverted abasic, inverted nucleotide or other terminal cap that is optionally present
  misc_feature (1)..(3): 2'-deoxy-2'Fluoro
  misc_feature (4)..(5): 2'-deoxy
  misc_feature (6)..(6): 2'-deoxy-2'Fluoro
  misc_feature (7)..(10): 2'-deoxy
  misc_feature (11)..(11): 2'-deoxy-2'Fluoro
  misc_feature (12)..(12): 2'-deoxy
  misc_feature (13)..(15): 2'-deoxy-2'Fluoro
  misc_feature (16)..(16): 2'-deoxy
  misc_feature (17)..(17): 2'-deoxy-2'Fluoro
  misc_feature (18)..(19): 2'-deoxy
  misc_feature (1)..(19): ribonucleotide unmodified or modified as described for this sequence
ccugauagggugcuugcgatt

SEQ ID NO: 1565 - DNA, 21 bp, Artificial Sequence
  Description of Artificial Sequence: Target Sequence/siNA sense region (stab07)
  misc_feature (1)..(1): 5'-3 attached terminal deoxyabasic moiety, inverted abasic, inverted nucleotide or other terminal cap that is optionally present
  misc_feature (21)..(21): 3'-3 attached terminal deoxyabasic moiety, inverted abasic, inverted nucleotide or other terminal cap that is optionally present
  misc_feature (1)..(2): 2'-deoxy
  misc_feature (3)..(3): 2'-deoxy-2'Fluoro
  misc_feature (4)..(7): 2'-deoxy
  misc_feature (8)..(8): 2'-deoxy-2'Fluoro
  misc_feature (9)..(9): 2'-deoxy
  misc_feature (10)..(12): 2'-deoxy-2'Fluoro
  misc_feature (13)..(13): 2'-deoxy
  misc_feature (14)..(14): 2'-deoxy-2'Fluoro
  misc_feature (15)..(17): 2'-deoxy
  misc_feature (18)..(18): 2'-deoxy-2'Fluoro
  misc_feature (19)..(19): 2'-deoxy
  misc_feature (1)..(19): ribonucleotide unmodified or modified as described for this sequence
gauagggugcuugcgagugtt

SEQ ID NO: 1566 - DNA, 21 bp, Artificial Sequence
  Description of Artificial Sequence: Target Sequence/siNA sense region (stab07)
  misc_feature (1)..(1): 5'-3 attached terminal deoxyabasic moiety, inverted abasic, inverted nucleotide or other terminal cap that is optionally present
  misc_feature (21)..(21): 3'-3 attached terminal deoxyabasic moiety, inverted abasic, inverted nucleotide or other terminal cap that is optionally present
  misc_feature (1)..(1): 2'-deoxy
  misc_feature (2)..(5): 2'-deoxy-2'Fluoro
  misc_feature (6)..(11): 2'-deoxy
  misc_feature (12)..(15): 2'-deoxy-2'Fluoro
  misc_feature (16)..(16): 2'-deoxy
  misc_feature (17)..(17): 2'-deoxy-2'Fluoro
  misc_feature (18)..(19): 2'-deoxy
  misc_feature (1)..(19): ribonucleotide unmodified or modified as described for this sequence
gccccgggaggucucguagtt

SEQ ID NO: 1567 - DNA, 21 bp, Artificial Sequence
  Description of Artificial Sequence: Target Sequence/siNA antisense region (stab08)
  misc_feature (20)..(20): Phosphorothioate or Phosphorodithioate 3'-Internucleotide Linkage (optionally present)
  misc_feature (2)..(3): 2'-deoxy-2'Fluoro
  misc_feature (4)..(5): 2'-O-methyl
  misc_feature (6)..(9): 2'-deoxy-2'Fluoro
  misc_feature (10)..(10): 2'-O-methyl
  misc_feature (11)..(11): 2'-deoxy-2'Fluoro
  misc_feature (12)..(14): 2'-O-methyl
  misc_feature (15)..(16): 2'-deoxy-2'Fluoro
  misc_feature (17)..(17): 2'-O-methyl
  misc_feature (18)..(19): 2'-deoxy-2'Fluoro
  misc_feature (1)..(19): ribonucleotide unmodified or modified as described for this sequence
accgguuccgcagaccacutt

SEQ ID NO: 1568 - DNA, 21 bp, Artificial Sequence
  Description of Artificial Sequence: Target Sequence/siNA antisense region (stab08)
  misc_feature (20)..(20): Phosphorothioate or Phosphorodithioate 3'-Internucleotide Linkage (optionally present)
  misc_feature (2)..(2): 2'-deoxy-2'Fluoro
  misc_feature (3)..(3): 2'-O-methyl
  misc_feature (4)..(6): 2'-deoxy-2'Fluoro
  misc_feature (7)..(7): 2'-O-methyl
  misc_feature (8)..(9): 2'-deoxy-2'Fluoro
  misc_feature (10)..(11): 2'-O-methyl
  misc_feature (12)..(15): 2'-deoxy-2'Fluoro
  misc_feature (16)..(16): 2'-O-methyl
  misc_feature (17)..(17): 2'-deoxy-2'Fluoro
  misc_feature (18)..(19): 2'-O-methyl
  misc_feature (1)..(19): ribonucleotide unmodified or modified as described for this sequence
guacucaccgguuccgcagtt

SEQ ID NO: 1569 - DNA, 21 bp, Artificial Sequence
  Description of Artificial Sequence: Target Sequence/siNA antisense region (stab08)
  misc_feature (20)..(20): Phosphorothioate or Phosphorodithioate 3'-Internucleotide Linkage (optionally present)
  misc_feature (1)..(1): 2'-deoxy-2'Fluoro
  misc_feature (2)..(2): 2'-O-methyl
  misc_feature (3)..(4): 2'-deoxy-2'Fluoro
  misc_feature (5)..(7): 2'-O-methyl
  misc_feature (8)..(8): 2'-deoxy-2'Fluoro
  misc_feature (9)..(10): 2'-O-methyl
  misc_feature (11)..(11): 2'-deoxy-2'Fluoro
  misc_feature (12)..(12): 2'-O-methyl
  misc_feature (13)..(14): 2'-deoxy-2'Fluoro
  misc_feature (15)..(15): 2'-O-methyl
  misc_feature (16)..(16): 2'-deoxy-2'Fluoro
  misc_feature (17)..(19): 2'-O-methyl
  misc_feature (1)..(19): ribonucleotide unmodified or modified as described for this sequence
uaucaggcaguaccacaagtt

SEQ ID NO: 1570 - DNA, 21 bp, Artificial Sequence
  Description of Artificial Sequence: Target Sequence/siNA antisense region (stab08)
  misc_feature (20)..(20): Phosphorothioate or Phosphorodithioate 3'-Internucleotide Linkage (optionally present)
  misc_feature (2)..(5): 2'-deoxy-2'Fluoro
  misc_feature (6)..(6): 2'-O-methyl
  misc_feature (7)..(8): 2'-deoxy-2'Fluoro
  misc_feature (9)..(11): 2'-O-methyl
  misc_feature (12)..(12): 2'-deoxy-2'Fluoro
  misc_feature (13)..(14): 2'-O-methyl
  misc_feature (15)..(15): 2'-deoxy-2'Fluoro
  misc_feature (16)..(16): 2'-O-methyl
  misc_feature (17)..(18): 2'-deoxy-2'Fluoro
  misc_feature (19)..(19): 2'-O-methyl
  misc_feature (1)..(19): ribonucleotide unmodified or modified as described for this sequence
acccuaucaggcaguaccatt

SEQ ID NO: 1571 - DNA, 21 bp, Artificial Sequence
  Description of Artificial Sequence: Target Sequence/siNA antisense region (stab08)
  misc_feature (20)..(20): Phosphorothioate or Phosphorodithioate 3'-Internucleotide Linkage (optionally present)
  misc_feature (1)..(1): 2'-deoxy-2'Fluoro
  misc_feature (2)..(2): 2'-O-methyl
  misc_feature (3)..(6): 2'-deoxy-2'Fluoro
  misc_feature (7)..(7): 2'-O-methyl
  misc_feature (8)..(9): 2'-deoxy-2'Fluoro
  misc_feature (10)..(12): 2'-O-methyl
  misc_feature (13)..(13): 2'-deoxy-2'Fluoro
  misc_feature (14)..(15): 2'-O-methyl
  misc_feature (16)..(16): 2'-deoxy-2'Fluoro
  misc_feature (17)..(17): 2'-O-methyl
  misc_feature (18)..(19): 2'-deoxy-2'Fluoro
  misc_feature (1)..(19): ribonucleotide unmodified or modified as described for this sequence
cacccuaucaggcaguacctt

SEQ ID NO: 1572 - DNA, 21 bp, Artificial Sequence
  Description of Artificial Sequence: Target Sequence/siNA antisense region (stab08)
  misc_feature (20)..(20): Phosphorothioate or Phosphorodithioate 3'-Internucleotide Linkage (optionally present)
  misc_feature (2)..(2): 2'-deoxy-2'Fluoro
  misc_feature (3)..(3): 2'-O-methyl
  misc_feature (4)..(7): 2'-deoxy-2'Fluoro
  misc_feature (8)..(8): 2'-O-methyl
  misc_feature (9)..(10): 2'-deoxy-2'Fluoro
  misc_feature (11)..(13): 2'-O-methyl
  misc_feature (14)..(14): 2'-deoxy-2'Fluoro
  misc_feature (15)..(16): 2'-O-methyl
  misc_feature (17)..(17): 2'-deoxy-2'Fluoro
  misc_feature (18)..(18): 2'-O-methyl
  misc_feature (19)..(19): 2'-deoxy-2'Fluoro
  misc_feature (1)..(19): ribonucleotide unmodified or modified as described for this sequence
gcacccuaucaggcaguactt

SEQ ID NO: 1573 - DNA, 21 bp, Artificial Sequence
  Description of Artificial Sequence: Target Sequence/siNA antisense region (stab08)
  misc_feature (20)..(20): Phosphorothioate or Phosphorodithioate 3'-Internucleotide Linkage (optionally present)
  misc_feature (3)..(3): 2'-deoxy-2'Fluoro
  misc_feature (4)..(4): 2'-O-methyl
  misc_feature (5)..(8): 2'-deoxy-2'Fluoro
  misc_feature (9)..(9): 2'-O-methyl
  misc_feature (10)..(11): 2'-deoxy-2'Fluoro
  misc_feature (12)..(14): 2'-O-methyl
  misc_feature (15)..(15): 2'-deoxy-2'Fluoro
  misc_feature (16)..(17): 2'-O-methyl
  misc_feature (18)..(18): 2'-deoxy-2'Fluoro
  misc_feature (19)..(19): 2'-O-methyl
  misc_feature (1)..(19): ribonucleotide unmodified or modified as described for this sequence
agcacccuaucaggcaguatt

SEQ ID NO: 1574 - DNA, 21 bp, Artificial Sequence
  Description of Artificial Sequence: Target Sequence/siNA antisense region (stab08)
  misc_feature (20)..(20): Phosphorothioate or Phosphorodithioate 3'-Internucleotide Linkage (optionally present)
  misc_feature (1)..(1): 2'-deoxy-2'Fluoro
  misc_feature (2)..(4): 2'-O-methyl
  misc_feature (5)..(5): 2'-deoxy-2'Fluoro
  misc_feature (6)..(6): 2'-O-methyl
  misc_feature (7)..(10): 2'-deoxy-2'Fluoro
  misc_feature (11)..(11): 2'-O-methyl
  misc_feature (12)..(13): 2'-deoxy-2'Fluoro
  misc_feature (14)..(16): 2'-O-methyl
  misc_feature (17)..(17): 2'-deoxy-2'Fluoro
  misc_feature (18)..(19): 2'-O-methyl
  misc_feature (1)..(19): ribonucleotide unmodified or modified as described for this sequence
caagcacccuaucaggcagtt

SEQ ID NO: 1575 - DNA, 21 bp, Artificial Sequence
  Description of Artificial Sequence: Target Sequence/siNA antisense region (stab08)
  misc_feature (20)..(20): Phosphorothioate or Phosphorodithioate 3'-Internucleotide Linkage (optionally present)
  misc_feature (2)..(2): 2'-deoxy-2'Fluoro
  misc_feature (3)..(5): 2'-O-methyl
  misc_feature (6)..(6): 2'-deoxy-2'Fluoro
  misc_feature (7)..(7): 2'-O-methyl
  misc_feature (8)..(11): 2'-deoxy-2'Fluoro
  misc_feature (12)..(12): 2'-O-methyl
  misc_feature (13)..(14): 2'-deoxy-2'Fluoro
  misc_feature (15)..(17): 2'-O-methyl
  misc_feature (18)..(18): 2'-deoxy-2'Fluoro
  misc_feature (19)..(19): 2'-O-methyl
  misc_feature (1)..(19): ribonucleotide unmodified or modified as described for this sequence
gcaagcacccuaucaggcatt

SEQ ID NO: 1576 - DNA, 21 bp, Artificial Sequence
  Description of Artificial Sequence: Target Sequence/siNA antisense region (stab08)
  misc_feature (20)..(20): Phosphorothioate or Phosphorodithioate 3'-Internucleotide Linkage (optionally present)
  misc_feature (1)..(2): 2'-deoxy-2'Fluoro
  misc_feature (3)..(3): 2'-O-methyl
  misc_feature (4)..(4): 2'-deoxy-2'Fluoro
  misc_feature (5)..(7): 2'-O-methyl
  misc_feature (8)..(8): 2'-deoxy-2'Fluoro
  misc_feature (9)..(9): 2'-O-methyl
  misc_feature (10)..(13): 2'-deoxy-2'Fluoro
  misc_feature (14)..(14): 2'-O-methyl
  misc_feature (15)..(16): 2'-deoxy-2'Fluoro
  misc_feature (17)..(19): 2'-O-methyl
  misc_feature (1)..(19): ribonucleotide unmodified or modified as described for this sequence
ucgcaagcacccuaucaggtt

SEQ ID NO: 1577 - DNA, 21 bp, Artificial Sequence
  Description of Artificial Sequence: Target Sequence/siNA antisense region (stab08)
  misc_feature (20)..(20): Phosphorothioate or Phosphorodithioate 3'-Internucleotide Linkage (optionally present)
  misc_feature (1)..(1): 2'-deoxy-2'Fluoro
  misc_feature (2)..(2): 2'-O-methyl
  misc_feature (3)..(5): 2'-deoxy-2'Fluoro
  misc_feature (6)..(6): 2'-O-methyl
  misc_feature (7)..(7): 2'-deoxy-2'Fluoro
  misc_feature (8)..(10): 2'-O-methyl
  misc_feature (11)..(11): 2'-deoxy-2'Fluoro
  misc_feature (12)..(12): 2'-O-methyl
  misc_feature (13)..(16): 2'-deoxy-2'Fluoro
  misc_feature (17)..(17): 2'-O-methyl
  misc_feature (18)..(19): 2'-deoxy-2'Fluoro
  misc_feature (1)..(19): ribonucleotide unmodified or modified as described for this sequence
cacucgcaagcacccuauctt

SEQ ID NO: 1578 - DNA, 21 bp, Artificial Sequence
  Description of Artificial Sequence: Target Sequence/siNA antisense region (stab08)
  misc_feature (20)..(20): Phosphorothioate or Phosphorodithioate 3'-Internucleotide Linkage (optionally present)
  misc_feature (1)..(2): 2'-deoxy-2'Fluoro
  misc_feature (3)..(3): 2'-O-methyl
  misc_feature (4)..(4): 2'-deoxy-2'Fluoro
  misc_feature (5)..(8): 2'-O-methyl
  misc_feature (9)..(14): 2'-deoxy-2'Fluoro
  misc_feature (15)..(18): 2'-O-methyl
  misc_feature (19)..(19): 2'-deoxy-2'Fluoro
  misc_feature (1)..(19): ribonucleotide unmodified or modified as described for this sequence
cuacgagaccucccggggctt

SEQ ID NO: 1579 - DNA, 21 bp, Artificial Sequence
  Description of Artificial Sequence: Target Sequence/siNA sense region (stab07)
  misc_feature (1)..(1): 5'-3 attached terminal deoxyabasic moiety, inverted abasic, inverted nucleotide or other terminal cap that is optionally present
  misc_feature (21)..(21): 3'-3 attached terminal deoxyabasic moiety, inverted abasic, inverted nucleotide or other terminal cap that is optionally present
  misc_feature (1)..(1): 2'-deoxy-2'Fluoro
  misc_feature (2)..(3): 2'-deoxy
  misc_feature (4)..(5): 2'-deoxy-2'Fluoro
  misc_feature (6)..(9): 2'-deoxy
  misc_feature (10)..(10): 2'-deoxy-2'Fluoro
  misc_feature (11)..(11): 2'-deoxy
  misc_feature (12)..(14): 2'-deoxy-2'Fluoro
  misc_feature (15)..(16): 2'-deoxy
  misc_feature (17)..(17): 2'-deoxy-2'Fluoro
  misc_feature (18)..(19): 2'-deoxy
  misc_feature (1)..(19): ribonucleotide unmodified or modified as described for this sequence
uggccaaggcgucuggugatt

SEQ ID NO: 1580 - DNA, 21 bp, Artificial Sequence
  Description of Artificial Sequence: Target Sequence/siNA sense region (stab07)
  misc_feature (1)..(1): 5'-3 attached terminal deoxyabasic moiety, inverted abasic, inverted nucleotide or other terminal cap that is optionally present
  misc_feature (21)..(21): 3'-3 attached terminal deoxyabasic moiety, inverted abasic, inverted nucleotide or other terminal cap that is optionally present
  misc_feature (1)..(1): 2'-deoxy-2'Fluoro
  misc_feature (2)..(2): 2'-deoxy
  misc_feature (3)..(3): 2'-deoxy-2'Fluoro
  misc_feature (4)..(6): 2'-deoxy
  misc_feature (7)..(7): 2'-deoxy-2'Fluoro
  misc_feature (8)..(9): 2'-deoxy
  misc_feature (10)..(11): 2'-deoxy-2'Fluoro
  misc_feature (12)..(15): 2'-deoxy
  misc_feature (16)..(16): 2'-deoxy-2'Fluoro
  misc_feature (17)..(17): 2'-deoxy
  misc_feature (18)..(19): 2'-deoxy-2'Fluoro
  misc_feature (1)..(19): ribonucleotide unmodified or modified as described for this sequence
caugaguggccaaggcguctt

SEQ ID NO: 1581 - DNA, 21 bp, Artificial Sequence
  Description of Artificial Sequence: Target Sequence/siNA sense region (stab07)
  misc_feature (1)..(1): 5'-3 attached terminal deoxyabasic moiety, inverted abasic, inverted nucleotide or other terminal cap that is optionally present
  misc_feature (21)..(21): 3'-3 attached terminal deoxyabasic moiety, inverted abasic, inverted nucleotide or other terminal cap that is optionally present
  misc_feature (1)..(1): 2'-deoxy
  misc_feature (2)..(2): 2'-deoxy-2'Fluoro
  misc_feature (3)..(4): 2'-deoxy
  misc_feature (5)..(7): 2'-deoxy-2'Fluoro
  misc_feature (8)..(8): 2'-deoxy
  misc_feature (9)..(10): 2'-deoxy-2'Fluoro
  misc_feature (11)..(11): 2'-deoxy
  misc_feature (12)..(12): 2'-deoxy-2'Fluoro
  misc_feature (13)..(14): 2'-deoxy
  misc_feature (15)..(15): 2'-deoxy-2'Fluoro
  misc_feature (16)..(16): 2'-deoxy
  misc_feature (17)..(19): 2'-deoxy-2'Fluoro
  misc_feature (1)..(19): ribonucleotide unmodified or modified as described for this sequence
auaguccgucaugguguuctt

SEQ ID NO: 1582 - DNA, 21 bp, Artificial Sequence
  Description of Artificial Sequence: Target Sequence/siNA sense region (stab07)
  misc_feature (1)..(1): 5'-3 attached terminal deoxyabasic moiety, inverted abasic, inverted nucleotide or other terminal cap that is optionally present
  misc_feature (21)..(21): 3'-3 attached terminal deoxyabasic moiety, inverted abasic, inverted nucleotide or other terminal cap that is optionally present
  misc_feature (1)..(1): 2'-deoxy-2'Fluoro
  misc_feature (2)..(5): 2'-deoxy
  misc_feature (6)..(6): 2'-deoxy-2'Fluoro
  misc_feature (7)..(8): 2'-deoxy
  misc_feature (9)..(11): 2'-deoxy-2'Fluoro
  misc_feature (12)..(12): 2'-deoxy
  misc_feature (13)..(14): 2'-deoxy-2'Fluoro
  misc_feature (15)..(15): 2'-deoxy
  misc_feature (16)..(16): 2'-deoxy-2'Fluoro
  misc_feature (17)..(18): 2'-deoxy
  misc_feature (19)..(19): 2'-deoxy-2'Fluoro
  misc_feature (1)..(19): ribonucleotide unmodified or modified as described for this sequence
ugggauaguccgucauggutt

SEQ ID NO: 1583 - DNA, 21 bp, Artificial Sequence
  Description of Artificial Sequence: Target Sequence/siNA sense region (stab07)
  misc_feature (1)..(1): 5'-3 attached terminal deoxyabasic moiety, inverted abasic, inverted nucleotide or other terminal cap that is optionally present
  misc_feature (21)..(21): 3'-3 attached terminal deoxyabasic moiety, inverted abasic, inverted nucleotide or other terminal cap that is optionally present
  misc_feature (1)..(1): 2'-deoxy
  misc_feature (2)..(2): 2'-deoxy-2'Fluoro
  misc_feature (3)..(6): 2'-deoxy
  misc_feature (7)..(7): 2'-deoxy-2'Fluoro
  misc_feature (8)..(9): 2'-deoxy
  misc_feature (10)..(12): 2'-deoxy-2'Fluoro
  misc_feature (13)..(13): 2'-deoxy
  misc_feature (14)..(15): 2'-deoxy-2'Fluoro
  misc_feature (16)..(16): 2'-deoxy
  misc_feature (17)..(17): 2'-deoxy-2'Fluoro
  misc_feature (18)..(19): 2'-deoxy
  misc_feature (1)..(19): ribonucleotide unmodified or modified as described for this sequence
gugggauaguccgucauggtt

SEQ ID NO: 1584 - DNA, 21 bp, Artificial Sequence
  Description of Artificial Sequence: Target Sequence/siNA sense region (stab07)
  misc_feature (1)..(1): 5'-3 attached terminal deoxyabasic moiety, inverted abasic, inverted nucleotide or other terminal cap that is optionally present
  misc_feature (21)..(21): 3'-3 attached terminal deoxyabasic moiety, inverted abasic, inverted nucleotide or other terminal cap that is optionally present
  misc_feature (1)..(1): 2'-deoxy-2'Fluoro
  misc_feature (2)..(2): 2'-deoxy
  misc_feature (3)..(3): 2'-deoxy-2'Fluoro
  misc_feature (4)..(7): 2'-deoxy
  misc_feature (8)..(8): 2'-deoxy-2'Fluoro
  misc_feature (9)..(10): 2'-deoxy
  misc_feature (11)..(13): 2'-deoxy-2'Fluoro
  misc_feature (14)..(14): 2'-deoxy
  misc_feature (15)..(16): 2'-deoxy-2'Fluoro
  misc_feature (17)..(17): 2'-deoxy
  misc_feature (18)..(18): 2'-deoxy-2'Fluoro
  misc_feature (19)..(19): 2'-deoxy
  misc_feature (1)..(19): ribonucleotide unmodified or modified as described for this sequence
cgugggauaguccgucaugtt

SEQ ID NO: 1585 - DNA, 21 bp, Artificial Sequence
  Description of Artificial Sequence: Target Sequence/siNA sense region (stab07)
  misc_feature (1)..(1): 5'-3 attached terminal deoxyabasic moiety, inverted abasic, inverted nucleotide or other terminal cap that is optionally present
  misc_feature (21)..(21): 3'-3 attached terminal deoxyabasic moiety, inverted abasic, inverted nucleotide or other terminal cap that is optionally present
  misc_feature (1)..(2): 2'-deoxy-2'Fluoro
  misc_feature (3)..(3): 2'-deoxy
  misc_feature (4)..(4): 2'-deoxy-2'Fluoro
  misc_feature (5)..(8): 2'-deoxy
  misc_feature (9)..(9): 2'-deoxy-2'Fluoro
  misc_feature (10)..(11): 2'-deoxy
  misc_feature (12)..(14): 2'-deoxy-2'Fluoro
  misc_feature (15)..(15): 2'-deoxy
  misc_feature (16)..(17): 2'-deoxy-2'Fluoro
  misc_feature (18)..(18): 2'-deoxy
  misc_feature (19)..(19): 2'-deoxy-2'Fluoro
  misc_feature (1)..(19): ribonucleotide unmodified or modified as described for this sequence
ucgugggauaguccgucautt

SEQ ID NO: 1586 - DNA, 21 bp, Artificial Sequence
  Description of Artificial Sequence: Target Sequence/siNA sense region (stab07)
  misc_feature (1)..(1): 5'-3 attached terminal deoxyabasic moiety, inverted abasic, inverted nucleotide or other terminal cap that is optionally present
  misc_feature (21)..(21): 3'-3 attached terminal deoxyabasic moiety, inverted abasic, inverted nucleotide or other terminal cap that is optionally present
  misc_feature (1)..(1): 2'-deoxy
  misc_feature (2)..(4): 2'-deoxy-2'Fluoro
  misc_feature (5)..(5): 2'-deoxy
  misc_feature (6)..(6): 2'-deoxy-2'Fluoro
  misc_feature (7)..(10): 2'-deoxy
  misc_feature (11)..(11): 2'-deoxy-2'Fluoro
  misc_feature (12)..(13): 2'-deoxy
  misc_feature (14)..(16): 2'-deoxy-2'Fluoro
  misc_feature (17)..(17): 2'-deoxy
  misc_feature (18)..(19): 2'-deoxy-2'Fluoro
  misc_feature (1)..(19): ribonucleotide unmodified or modified as described for this sequence
guucgugggauaguccguctt

SEQ ID NO: 1587 - DNA, 21 bp, Artificial Sequence
  Description of Artificial Sequence: Target Sequence/siNA sense region (stab07)
  misc_feature (1)..(1): 5'-3 attached terminal deoxyabasic moiety, inverted abasic, inverted nucleotide or other terminal cap that is optionally present
  misc_feature (21)..(21): 3'-3 attached terminal deoxyabasic moiety, inverted abasic, inverted nucleotide or other terminal cap that is optionally present
  misc_feature (1)..(1): 2'-deoxy-2'Fluoro
  misc_feature (2)..(2): 2'-deoxy
  misc_feature (3)..(5): 2'-deoxy-2'Fluoro
  misc_feature (6)..(6): 2'-deoxy
  misc_feature (7)..(7): 2'-deoxy-2'Fluoro
  misc_feature (8)..(11): 2'-deoxy
  misc_feature (12)..(12): 2'-deoxy-2'Fluoro
  misc_feature (13)..(14): 2'-deoxy
  misc_feature (15)..(17): 2'-deoxy-2'Fluoro
  misc_feature (18)..(18): 2'-deoxy
  misc_feature (19)..(19): 2'-deoxy-2'Fluoro
  misc_feature (1)..(19): ribonucleotide unmodified or modified as described for this sequence
cguucgugggauaguccgutt

SEQ ID NO: 1588 - DNA, 21 bp, Artificial Sequence
  Description of Artificial Sequence: Target Sequence/siNA sense region (stab07)
  misc_feature (1)..(1): 5'-3 attached terminal deoxyabasic moiety, inverted abasic, inverted nucleotide or other terminal cap that is optionally present
  misc_feature (21)..(21): 3'-3 attached terminal deoxyabasic moiety, inverted abasic, inverted nucleotide or other terminal cap that is optionally present
  misc_feature (1)..(2): 2'-deoxy
  misc_feature (3)..(3): 2'-deoxy-2'Fluoro
  misc_feature (4)..(4): 2'-deoxy
  misc_feature (5)..(7): 2'-deoxy-2'Fluoro
  misc_feature (8)..(8): 2'-deoxy
  misc_feature (9)..(9): 2'-deoxy-2'Fluoro
  misc_feature (10)..(13): 2'-deoxy
  misc_feature (14)..(14): 2'-deoxy-2'Fluoro
  misc_feature (15)..(16): 2'-deoxy
  misc_feature (17)..(19): 2'-deoxy-2'Fluoro
  misc_feature (1)..(19): ribonucleotide unmodified or modified as described for this sequence
agcguucgugggauagucctt

SEQ ID NO: 1589 - DNA, 21 bp, Artificial Sequence
  Description of Artificial Sequence: Target Sequence/siNA sense region (stab07)
  misc_feature (1)..(1): 5'-3 attached terminal deoxyabasic moiety, inverted abasic, inverted nucleotide or other terminal cap that is optionally present
  misc_feature (21)..(21): 3'-3 attached terminal deoxyabasic moiety, inverted abasic, inverted nucleotide or other terminal cap that is optionally present
  misc_feature (1)..(1): 2'-deoxy
  misc_feature (2)..(2): 2'-deoxy-2'Fluoro
  misc_feature (3)..(5): 2'-deoxy
  misc_feature (6)..(6): 2'-deoxy-2'Fluoro
  misc_feature (7)..(7): 2'-deoxy
  misc_feature (8)..(10): 2'-deoxy-2'Fluoro
  misc_feature (11)..(11): 2'-deoxy
  misc_feature (12)..(12): 2'-deoxy-2'Fluoro
  misc_feature (13)..(16): 2'-deoxy
  misc_feature (17)..(17): 2'-deoxy-2'Fluoro
  misc_feature (18)..(19): 2'-deoxy
  misc_feature (1)..(19): ribonucleotide unmodified or modified as described for this sequence
gugagcguucgugggauagtt

SEQ ID NO: 1590 - DNA, 21 bp, Artificial Sequence
  Description of Artificial Sequence: Target Sequence/siNA sense region (stab07)
  misc_feature (1)..(1): 5'-3 attached terminal deoxyabasic moiety, inverted abasic, inverted nucleotide or other terminal cap that is optionally present
  misc_feature (21)..(21): 3'-3 attached terminal deoxyabasic moiety, inverted abasic, inverted nucleotide or other terminal cap that is optionally present
  misc_feature (1)..(2): 2'-deoxy
  misc_feature (3)..(3): 2'-deoxy-2'Fluoro
  misc_feature (4)..(4): 2'-deoxy
  misc_feature (5)..(8): 2'-deoxy-2'Fluoro
  misc_feature (9)..(14): 2'-deoxy
  misc_feature (15)..(18): 2'-deoxy-2'Fluoro
  misc_feature (19)..(19): 2'-deoxy
  misc_feature (1)..(19): ribonucleotide unmodified or modified as described for this sequence
gaugcucuggagggccccgtt

SEQ ID NO: 1591 - DNA, 21 bp, Artificial Sequence
  Description of Artificial Sequence: Target Sequence/siNA antisense region (stab08)
  misc_feature (20)..(20): Phosphorothioate or Phosphorodithioate 3'-Internucleotide Linkage (optionally present)
  misc_feature (1)..(2): 2'-deoxy-2'Fluoro
  misc_feature (3)..(3): 2'-O-methyl
  misc_feature (4)..(5): 2'-deoxy-2'Fluoro
  misc_feature (6)..(8): 2'-O-methyl
  misc_feature (9)..(9): 2'-deoxy-2'Fluoro
  misc_feature (10)..(10): 2'-O-methyl
  misc_feature (11)..(14): 2'-deoxy-2'Fluoro
  misc_feature (15)..(16): 2'-O-methyl
  misc_feature (17)..(18): 2'-deoxy-2'Fluoro
  misc_feature (19)..(19): 2'-O-methyl
  misc_feature (1)..(19): ribonucleotide unmodified or modified as described for this sequence
ucaccagacgccuuggccatt

SEQ ID NO: 1592 - DNA, 21 bp, Artificial Sequence
  Description of Artificial Sequence: Target Sequence/siNA antisense region (stab08)
  misc_feature (20)..(20): Phosphorothioate or Phosphorodithioate 3'-Internucleotide Linkage (optionally present)
  misc_feature (2)..(3): 2'-deoxy-2'Fluoro
  misc_feature (4)..(4): 2'-O-methyl
  misc_feature (5)..(8): 2'-deoxy-2'Fluoro
  misc_feature (9)..(10): 2'-O-methyl
  misc_feature (11)..(12): 2'-deoxy-2'Fluoro
  misc_feature (13)..(13): 2'-O-methyl
  misc_feature (14)..(16): 2'-deoxy-2'Fluoro
  misc_feature (17)..(17): 2'-O-methyl
  misc_feature (18)..(18): 2'-deoxy-2'Fluoro
  misc_feature (19)..(19): 2'-O-methyl
  misc_feature (1)..(19): ribonucleotide unmodified or modified as described for this sequence
gacgccuuggccacucaugtt

SEQ ID NO: 1593 - DNA, 21 bp, Artificial Sequence
  Description of Artificial Sequence: Target Sequence/siNA antisense region (stab08)
  misc_feature (20)..(20): Phosphorothioate or Phosphorodithioate 3'-Internucleotide Linkage (optionally present)
  misc_feature (4)..(4): 2'-deoxy-2'Fluoro
  misc_feature (5)..(5): 2'-O-methyl
  misc_feature (6)..(7): 2'-deoxy-2'Fluoro
  misc_feature (8)..(8): 2'-O-methyl
  misc_feature (9)..(9): 2'-deoxy-2'Fluoro
  misc_feature (10)..(11): 2'-O-methyl
  misc_feature (12)..(12): 2'-deoxy-2'Fluoro
  misc_feature (13)..(15): 2'-O-methyl
  misc_feature (16)..(17): 2'-deoxy-2'Fluoro
  misc_feature (18)..(18): 2'-O-methyl
  misc_feature (19)..(19): 2'-deoxy-2'Fluoro
  misc_feature (1)..(19): ribonucleotide unmodified or modified as described for this sequence
gaacaccaugacggacuautt

SEQ ID NO: 1594 - DNA, 21 bp, Artificial Sequence
  Description of Artificial Sequence: Target Sequence/siNA antisense region (stab08)
  misc_feature (20)..(20): Phosphorothioate or Phosphorodithioate 3'-Internucleotide Linkage (optionally present)
  misc_feature (2)..(3): 2'-deoxy-2'Fluoro
  misc_feature (4)..(4): 2'-O-methyl
  misc_feature (5)..(5): 2'-deoxy-2'Fluoro
  misc_feature (6)..(7): 2'-O-methyl
  misc_feature (8)..(8): 2'-deoxy-2'Fluoro
  misc_feature (9)..(11): 2'-O-methyl
  misc_feature (12)..(13): 2'-deoxy-2'Fluoro
  misc_feature (14)..(14): 2'-O-methyl
  misc_feature (15)..(18): 2'-deoxy-2'Fluoro
  misc_feature (19)..(19): 2'-O-methyl
  misc_feature (1)..(19): ribonucleotide unmodified or modified as described for this sequence
accaugacggacuaucccatt

SEQ ID NO: 1595 - DNA, 21 bp, Artificial Sequence
  Description of Artificial Sequence: Target Sequence/siNA antisense region (stab08)
  misc_feature (20)..(20): Phosphorothioate or Phosphorodithioate 3'-Internucleotide Linkage (optionally present)
  misc_feature (1)..(2): 2'-deoxy-2'Fluoro
  misc_feature (3)..(3): 2'-O-methyl
  misc_feature (4)..(4): 2'-deoxy-2'Fluoro
  misc_feature (5)..(6): 2'-O-methyl
  misc_feature (7)..(7): 2'-deoxy-2'Fluoro
  misc_feature (8)..(10): 2'-O-methyl
  misc_feature (11)..(12): 2'-deoxy-2'Fluoro
  misc_feature (13)..(13): 2'-O-methyl
  misc_feature (14)..(17): 2'-deoxy-2'Fluoro
  misc_feature (18)..(18): 2'-O-methyl
  misc_feature (19)..(19): 2'-deoxy-2'Fluoro
  misc_feature (1)..(19): ribonucleotide unmodified or modified as described for this sequence
ccaugacggacuaucccactt

SEQ ID NO: 1596 - DNA, 21 bp, Artificial Sequence
  Description of Artificial Sequence: Target Sequence/siNA antisense region (stab08)
  misc_feature (20)..(20): Phosphorothioate or Phosphorodithioate 3'-Internucleotide Linkage (optionally present)
  misc_feature (1)..(1): 2'-deoxy-2'Fluoro
  misc_feature (2)..(2): 2'-O-methyl
  misc_feature (3)..(3): 2'-deoxy-2'Fluoro
  misc_feature (4)..(5): 2'-O-methyl
  misc_feature (6)..(6): 2'-deoxy-2'Fluoro
  misc_feature (7)..(9): 2'-O-methyl
  misc_feature (10)..(11): 2'-deoxy-2'Fluoro
  misc_feature (12)..(12): 2'-O-methyl
  misc_feature (13)..(16): 2'-deoxy-2'Fluoro
  misc_feature (17)..(17): 2'-O-methyl
  misc_feature (18)..(18): 2'-deoxy-2'Fluoro
  misc_feature (19)..(19): 2'-O-methyl
  misc_feature (1)..(19): ribonucleotide unmodified or modified as described for this sequence
caugacggacuaucccacgtt

SEQ ID NO: 1597 - DNA, 21 bp, Artificial Sequence
  Description of Artificial Sequence: Target Sequence/siNA antisense region (stab08)
  misc_feature (20)..(20): Phosphorothioate or Phosphorodithioate 3'-Internucleotide Linkage (optionally present)
  misc_feature (2)..(2): 2'-deoxy-2'Fluoro
  misc_feature (3)..(4): 2'-O-methyl
  misc_feature (5)..(5): 2'-deoxy-2'Fluoro
  misc_feature (6)..(8): 2'-O-methyl
  misc_feature (9)..(10): 2'-deoxy-2'Fluoro
  misc_feature (11)..(11): 2'-O-methyl
  misc_feature (12)..(15): 2'-deoxy-2'Fluoro
  misc_feature (16)..(16): 2'-O-methyl
  misc_feature (17)..(17): 2'-deoxy-2'Fluoro
  misc_feature (18)..(19): 2'-O-methyl
  misc_feature (1)..(19): ribonucleotide unmodified or modified as described for this sequence
augacggacuaucccacgatt

SEQ ID NO: 1598 - DNA, 21 bp, Artificial Sequence
  Description of Artificial Sequence: Target Sequence/siNA antisense region (stab08)
  misc_feature (20)..(20): Phosphorothioate or Phosphorodithioate 3'-Internucleotide Linkage (optionally present)
  misc_feature (3)..(3): 2'-deoxy-2'Fluoro
  misc_feature (4)..(6): 2'-O-methyl
  misc_feature (7)..(8): 2'-deoxy-2'Fluoro
  misc_feature (9)..(9): 2'-O-methyl
  misc_feature (10)..(13): 2'-deoxy-2'Fluoro
  misc_feature (14)..(14): 2'-O-methyl
  misc_feature (15)..(15): 2'-deoxy-2'Fluoro
  misc_feature (16)..(18): 2'-O-methyl
  misc_feature (19)..(19): 2'-deoxy-2'Fluoro
  misc_feature (1)..(19): ribonucleotide unmodified or modified as described for this sequence
gacggacuaucccacgaactt

SEQ ID NO: 1599 - DNA, 21 bp, Artificial Sequence
  Description of Artificial Sequence: Target Sequence/siNA antisense region (stab08)
  misc_feature (20)..(20): Phosphorothioate or Phosphorodithioate 3'-Internucleotide Linkage (optionally present)
  misc_feature (2)..(2): 2'-deoxy-2'Fluoro
  misc_feature (3)..(5): 2'-O-methyl
  misc_feature (6)..(7): 2'-deoxy-2'Fluoro
  misc_feature (8)..(8): 2'-O-methyl
  misc_feature (9)..(12): 2'-deoxy-2'Fluoro
  misc_feature (13)..(13): 2'-O-methyl
  misc_feature (14)..(14): 2'-deoxy-2'Fluoro
  misc_feature (15)..(17): 2'-O-methyl
  misc_feature (18)..(18): 2'-deoxy-2'Fluoro
  misc_feature (19)..(19): 2'-O-methyl
  misc_feature (1)..(19): ribonucleotide unmodified or modified as described for this sequence
acggacuaucccacgaacgtt

SEQ ID NO: 1600 - DNA, 21 bp, Artificial Sequence
  Description of Artificial Sequence: Target Sequence/siNA antisense region (stab08)
  misc_feature (20)..(20): Phosphorothioate or Phosphorodithioate 3'-Internucleotide Linkage (optionally present)
  misc_feature (4)..(5): 2'-deoxy-2'Fluoro
  misc_feature (6)..(6): 2'-O-methyl
  misc_feature (7)..(10): 2'-deoxy-2'Fluoro
  misc_feature (11)..(11): 2'-O-methyl
  misc_feature (12)..(12): 2'-deoxy-2'Fluoro
  misc_feature (13)..(15): 2'-O-methyl
  misc_feature (16)..(16): 2'-deoxy-2'Fluoro
  misc_feature (17)..(17): 2'-O-methyl
  misc_feature (18)..(19): 2'-deoxy-2'Fluoro
  misc_feature (1)..(19): ribonucleotide unmodified or modified as described for this sequence
ggacuaucccacgaacgcutt

SEQ ID NO: 1601 - DNA, 21 bp, Artificial Sequence
  Description of Artificial Sequence: Target Sequence/siNA antisense region (stab08)
  misc_feature (20)..(20): Phosphorothioate or Phosphorodithioate 3'-Internucleotide Linkage (optionally present)
  misc_feature (1)..(2): 2'-deoxy-2'Fluoro
  misc_feature (3)..(3): 2'-O-methyl
  misc_feature (4)..(7): 2'-deoxy-2'Fluoro
  misc_feature (8)..(8): 2'-O-methyl
  misc_feature (9)..(9): 2'-deoxy-2'Fluoro
  misc_feature (10)..(12): 2'-O-methyl
  misc_feature (13)..(13): 2'-deoxy-2'Fluoro
  misc_feature (14)..(14): 2'-O-methyl
  misc_feature (15)..(17): 2'-deoxy-2'Fluoro
  misc_feature (18)..(18): 2'-O-methyl
  misc_feature (19)..(19): 2'-deoxy-2'Fluoro
  misc_feature (1)..(19): ribonucleotide unmodified or modified as described for this sequence
cuaucccacgaacgcucactt

SEQ ID NO: 1602 - DNA, 21 bp, Artificial Sequence
  Description of Artificial Sequence: Target Sequence/siNA antisense region (stab08)
  misc_feature (20)..(20): Phosphorothioate or Phosphorodithioate 3'-Internucleotide Linkage (optionally present)
  misc_feature (1)..(1): 2'-deoxy-2'Fluoro
  misc_feature (2)..(5): 2'-O-methyl
  misc_feature (6)..(11): 2'-deoxy-2'Fluoro
  misc_feature (12)..(15): 2'-O-methyl
  misc_feature (16)..(16): 2'-deoxy-2'Fluoro
  misc_feature (17)..(17): 2'-O-methyl
  misc_feature (18)..(19): 2'-deoxy-2'Fluoro
  misc_feature (1)..(19): ribonucleotide unmodified or modified as described for this sequence
cggggcccuccagagcauctt

SEQ ID NO: 1603 - DNA, 21 bp, Artificial Sequence
  Description of Artificial Sequence: Target Sequence/siNA sense region (stab04)
  misc_feature (1)..(1): 5'-3 attached terminal deoxyabasic moiety, inverted abasic, inverted nucleotide or other terminal cap that is optionally present
  misc_feature (21)..(21): 3'-3 attached terminal deoxyabasic moiety, inverted abasic, inverted nucleotide or other terminal cap that is optionally present
  misc_feature (1)..(4): 2'-deoxy-2'Fluoro
  misc_feature (11)..(14): 2'-deoxy-2'Fluoro
  misc_feature (16)..(16): 2'-deoxy-2'Fluoro
  misc_feature (1)..(19): ribonucleotide unmodified or modified as described for this sequence
ccccgggaggucucguagatt

SEQ ID NO: 1604 - DNA, 21 bp, Artificial Sequence
  Description of Artificial Sequence: Target Sequence/siNA sense region (stab04)
  misc_feature (1)..(1): 5'-3 attached terminal deoxyabasic moiety, inverted abasic, inverted nucleotide or other terminal cap that is optionally present
  misc_feature (21)..(21): 3'-3 attached terminal deoxyabasic moiety, inverted abasic, inverted nucleotide or other terminal cap that is optionally present
  misc_feature (4)..(4): 2'-deoxy-2'Fluoro
  misc_feature (6)..(9): 2'-deoxy-2'Fluoro
  misc_feature (16)..(19): 2'-deoxy-2'Fluoro
  misc_feature (1)..(19): ribonucleotide unmodified or modified as described for this sequence
agaugcucuggagggcccctt

SEQ ID NO: 1605 - DNA, 21 bp, Artificial Sequence
  Description of Artificial Sequence: Target Sequence/siNA antisense region (stab05)
  misc_feature (20)..(20): Phosphorothioate or Phosphorodithioate 3'-Internucleotide Linkage (optionally present)
  misc_feature (1)..(3): 2'-deoxy-2'Fluoro
  misc_feature (5)..(5): 2'-deoxy-2'Fluoro
  misc_feature (10)..(15): 2'-deoxy-2'Fluoro
  misc_feature (1)..(19): ribonucleotide unmodified or modified as described for this sequence
ucuacgagaccucccggggtt

SEQ ID NO: 1606 - DNA, 21 bp, Artificial Sequence
  Description of Artificial Sequence: Target Sequence/siNA antisense region (stab05)
  misc_feature (20)..(20): Phosphorothioate or Phosphorodithioate 3'-Internucleotide Linkage (optionally present)
  misc_feature (5)..(10): 2'-deoxy-2'Fluoro
  misc_feature (15)..(15): 2'-deoxy-2'Fluoro
  misc_feature (17)..(19): 2'-deoxy-2'Fluoro
  misc_feature (1)..(19): ribonucleotide unmodified or modified as described for this sequence
ggggcccuccagagcaucutt

SEQ ID NO: 1607 - DNA, 21 bp, Artificial Sequence
  Description of Artificial Sequence: Target Sequence/siNA sense region (stab07)
  misc_feature (1)..(1): 5'-3 attached terminal deoxyabasic moiety, inverted abasic, inverted nucleotide or other terminal cap that is optionally present
  misc_feature (21)..(21): 3'-3 attached terminal deoxyabasic moiety, inverted abasic, inverted nucleotide or other terminal cap that is optionally present
  misc_feature (1)..(4): 2'-deoxy-2'Fluoro
  misc_feature (5)..(10): 2'-deoxy
  misc_feature (11)..(14): 2'-deoxy-2'Fluoro
  misc_feature (15)..(15): 2'-deoxy
  misc_feature (16)..(16): 2'-deoxy-2'Fluoro
  misc_feature (17)..(19): 2'-deoxy
  misc_feature (1)..(19): ribonucleotide unmodified or modified as described for this sequence
ccccgggaggucucguagatt

SEQ ID NO: 1608 - DNA, 21 bp, Artificial Sequence
  Description of Artificial Sequence: Target Sequence/siNA sense region (stab07)
  misc_feature (1)..(1): 5'-3 attached terminal deoxyabasic moiety, inverted abasic, inverted nucleotide or other terminal cap that is optionally present
  misc_feature (21)..(21): 3'-3 attached terminal deoxyabasic moiety, inverted abasic, inverted nucleotide or other terminal cap that is optionally present
  misc_feature (1)..(3): 2'-deoxy
  misc_feature (4)..(4): 2'-deoxy-2'Fluoro
  misc_feature (5)..(5): 2'-deoxy
  misc_feature (6)..(9): 2'-deoxy-2'Fluoro
  misc_feature (10)..(15): 2'-deoxy
  misc_feature (16)..(19): 2'-deoxy-2'Fluoro
  misc_feature (1)..(19): ribonucleotide unmodified or modified as described for this sequence
agaugcucuggagggcccctt

SEQ ID NO: 1609 - DNA, 21 bp, Artificial Sequence
  Description of Artificial Sequence: Target Sequence/siNA antisense region (stab08)
  misc_feature (20)..(20): Phosphorothioate or Phosphorodithioate 3'-Internucleotide Linkage (optionally present)
  misc_feature (5)..(10): 2'-deoxy-2'Fluoro
  misc_feature (11)..(14): 2'-O-methyl
  misc_feature (15)..(15): 2'-deoxy-2'Fluoro
  misc_feature (16)..(16): 2'-O-methyl
  misc_feature (17)..(19): 2'-deoxy-2'Fluoro
  misc_feature (1)..(19): ribonucleotide unmodified or modified as described for this sequence
ggggcccuccagagcaucutt

SEQ ID NO: 1610 - DNA, 21 bp, Artificial Sequence
  Description of Artificial Sequence: Target Sequence/siNA antisense region (stab11)
  misc_feature (20)..(20): Phosphorothioate or Phosphorodithioate 3'-Internucleotide Linkage (optionally present)
  misc_feature (1)..(3): 2'-deoxy-2'Fluoro
  misc_feature (5)..(5): 2'-deoxy-2'Fluoro
  misc_feature (10)..(15): 2'-deoxy-2'Fluoro
  misc_feature (1)..(19): ribonucleotide unmodified or modified as described for this sequence
ucuacgagaccucccggggtt

SEQ ID NO: 1611 - DNA, 21 bp, Artificial Sequence
  Description of Artificial Sequence: Target Sequence/siNA antisense region (stab11)
  misc_feature (20)..(20): Phosphorothioate or Phosphorodithioate 3'-Internucleotide Linkage (optionally present)
  misc_feature (5)..(10): 2'-deoxy-2'Fluoro
  misc_feature (11)..(14): 2'-deoxy
  misc_feature (15)..(15): 2'-deoxy-2'Fluoro
  misc_feature (16)..(16): 2'-deoxy
  misc_feature (17)..(19): 2'-deoxy-2'Fluoro
  misc_feature (1)..(19): ribonucleotide unmodified or modified as described for this sequence
ggggcccuccagagcaucutt

SEQ ID NO: 1612 - DNA, 21 bp, Artificial Sequence
  Description of Artificial Sequence: Target Sequence/siNA sense region (stab04)
  misc_feature (1)..(1): 5'-3 attached terminal deoxyabasic moiety, inverted abasic, inverted nucleotide or other terminal cap that is optionally present
  misc_feature (21)..(21): 3'-3 attached terminal deoxyabasic moiety, inverted abasic, inverted nucleotide or other terminal cap that is optionally present
  misc_feature (3)..(3): 2'-deoxy-2'Fluoro
  misc_feature (6)..(8): 2'-deoxy-2'Fluoro
  misc_feature (10)..(10): 2'-deoxy-2'Fluoro
  misc_feature (15)..(16): 2'-deoxy-2'Fluoro
  misc_feature (19)..(19): 2'-deoxy-2'Fluoro
  misc_feature (1)..(19): ribonucleotide unmodified or modified as described for this sequence
aguggucugcggaaccggutt

SEQ ID NO: 1613 - DNA, 21 bp, Artificial Sequence
  Description of Artificial Sequence: Target Sequence/siNA sense region (stab04)
  misc_feature (1)..(1): 5'-3 attached terminal deoxyabasic moiety, inverted abasic, inverted nucleotide or other terminal cap that is optionally present
  misc_feature (21)..(21): 3'-3 attached terminal deoxyabasic moiety, inverted abasic, inverted nucleotide or other terminal cap that is optionally present
  misc_feature (1)..(2): 2'-deoxy-2'Fluoro
  misc_feature (4)..(4): 2'-deoxy-2'Fluoro
  misc_feature (9)..(10): 2'-deoxy-2'Fluoro
  misc_feature (13)..(13): 2'-deoxy-2'Fluoro
  misc_feature (17)..(17): 2'-deoxy-2'Fluoro
  misc_feature (19)..(19): 2'-deoxy-2'Fluoro
  misc_feature (1)..(19): ribonucleotide unmodified or modified as described for this sequence
cugcggaaccggugaguactt

SEQ ID NO: 1614 - DNA, 21 bp, Artificial Sequence
  Description of Artificial Sequence: Target Sequence/siNA sense region (stab04)
  misc_feature (1)..(1): 5'-3 attached terminal deoxyabasic moiety, inverted abasic, inverted nucleotide or other terminal cap that is optionally present
  misc_feature (21)..(21): 3'-3 attached terminal deoxyabasic moiety, inverted abasic, inverted nucleotide or other terminal cap that is optionally present
  misc_feature (4)..(7): 2'-deoxy-2'Fluoro
  misc_feature (9)..(9): 2'-deoxy-2'Fluoro
  misc_feature (12)..(12): 2'-deoxy-2'Fluoro
  misc_feature (14)..(15): 2'-deoxy-2'Fluoro
  misc_feature (17)..(19): 2'-deoxy-2'Fluoro
  misc_feature (1)..(19): ribonucleotide unmodified or modified as described for this sequence
aggccuugugguacugccutt

SEQ ID NO: 1615 - DNA, 21 bp, Artificial Sequence
  Description of Artificial Sequence: Target Sequence/siNA sense region (stab04)
  misc_feature (1)..(1): 5'-3 attached terminal deoxyabasic moiety, inverted abasic, inverted nucleotide or other terminal cap that is optionally present
  misc_feature (21)..(21): 3'-3 attached terminal deoxyabasic moiety, inverted abasic, inverted nucleotide or other terminal cap that is optionally present
  misc_feature (1)..(3): 2'-deoxy-2'Fluoro
  misc_feature (5)..(5): 2'-deoxy-2'Fluoro
  misc_feature (8)..(8): 2'-deoxy-2'Fluoro
  misc_feature (10)..(11): 2'-deoxy-2'Fluoro
  misc_feature (13)..(15): 2'-deoxy-2'Fluoro
  misc_feature (18)..(18): 2'-deoxy-2'Fluoro
  misc_feature (1)..(19): ribonucleotide unmodified or modified as described for this sequence
cuugugguacugccugauatt

SEQ ID NO: 1616 - DNA, 21 bp, Artificial Sequence
  Description of Artificial Sequence: Target Sequence/siNA sense region (stab04)
  misc_feature (1)..(1): 5'-3 attached terminal deoxyabasic moiety, inverted abasic, inverted nucleotide or other terminal cap that is optionally present
  misc_feature (21)..(21): 3'-3 attached terminal deoxyabasic moiety, inverted abasic, inverted nucleotide or other terminal cap that is optionally present
  misc_feature (1)..(1): 2'-deoxy-2'Fluoro
  misc_feature (4)..(4): 2'-deoxy-2'Fluoro
  misc_feature (6)..(7): 2'-deoxy-2'Fluoro
  misc_feature (9)..(11): 2'-deoxy-2'Fluoro
  misc_feature (14)..(14): 2'-deoxy-2'Fluoro
  misc_feature (19)..(19): 2'-deoxy-2'Fluoro
  misc_feature (1)..(19): ribonucleotide unmodified or modified as described for this sequence
ugguacugccugauagggutt

SEQ ID NO: 1617 - DNA, 21 bp, Artificial Sequence
  Description of Artificial Sequence: Target Sequence/siNA sense region (stab04)
  misc_feature (1)..(1): 5'-3 attached terminal deoxyabasic moiety, inverted abasic, inverted nucleotide or other terminal cap that is optionally present
  misc_feature (21)..(21): 3'-3 attached terminal deoxyabasic moiety, inverted abasic, inverted nucleotide or other terminal cap that is optionally present
  misc_feature (3)..(3): 2'-deoxy-2'Fluoro
  misc_feature (5)..(6): 2'-deoxy-2'Fluoro
  misc_feature (8)..(10): 2'-deoxy-2'Fluoro
  misc_feature (13)..(13): 2'-deoxy-2'Fluoro
  misc_feature (18)..(18): 2'-deoxy-2'Fluoro
  misc_feature (1)..(19): ribonucleotide unmodified or modified as described for this sequence
gguacugccugauagggugtt

SEQ ID NO: 1618 - DNA, 21 bp, Artificial Sequence
  Description of Artificial Sequence: Target Sequence/siNA sense region (stab04)
  misc_feature (1)..(1): 5'-3 attached terminal deoxyabasic moiety, inverted abasic, inverted nucleotide or other terminal cap that is optionally present
  misc_feature (21)..(21): 3'-3 attached terminal deoxyabasic moiety, inverted abasic, inverted nucleotide or other terminal cap that is optionally present
  misc_feature (2)..(2): 2'-deoxy-2'Fluoro
  misc_feature (4)..(5): 2'-deoxy-2'Fluoro
  misc_feature (7)..(9): 2'-deoxy-2'Fluoro
  misc_feature (12)..(12): 2'-deoxy-2'Fluoro
  misc_feature (17)..(17): 2'-deoxy-2'Fluoro
  misc_feature (19)..(19): 2'-deoxy-2'Fluoro
  misc_feature (1)..(19): ribonucleotide unmodified or modified as described for this sequence
guacugccugauagggugctt

SEQ ID NO: 1619 - DNA, 21 bp, Artificial Sequence
  Description of Artificial Sequence: Target Sequence/siNA sense region (stab04)
  misc_feature (1)..(1): 5'-3 attached terminal deoxyabasic moiety, inverted abasic, inverted nucleotide or other terminal cap that is optionally present
  misc_feature (21)..(21): 3'-3 attached terminal deoxyabasic moiety, inverted abasic, inverted nucleotide or other terminal cap that is optionally present
  misc_feature (1)..(1): 2'-deoxy-2'Fluoro
  misc_feature (3)..(4): 2'-deoxy-2'Fluoro
  misc_feature (6)..(8): 2'-deoxy-2'Fluoro
  misc_feature (11)..(11): 2'-deoxy-2'Fluoro
  misc_feature (16)..(16): 2'-deoxy-2'Fluoro
  misc_feature (18)..(19): 2'-deoxy-2'Fluoro
  misc_feature (1)..(19): ribonucleotide unmodified or modified as described for this sequence
uacugccugauagggugcutt

SEQ ID NO: 1620 - DNA, 21 bp, Artificial Sequence
  Description of Artificial Sequence: Target Sequence/siNA sense region (stab04)
  misc_feature (1)..(1): 5'-3 attached terminal deoxyabasic moiety, inverted abasic, inverted nucleotide or other terminal cap that is optionally present
  misc_feature (21)..(21): 3'-3 attached terminal deoxyabasic moiety, inverted abasic, inverted nucleotide or other terminal cap that is optionally present
  misc_feature (1)..(2): 2'-deoxy-2'Fluoro
  misc_feature (4)..(6): 2'-deoxy-2'Fluoro
  misc_feature (9)..(9): 2'-deoxy-2'Fluoro
  misc_feature (14)..(14): 2'-deoxy-2'Fluoro
  misc_feature (16)..(18): 2'-deoxy-2'Fluoro
  misc_feature (1)..(19): ribonucleotide unmodified or modified as described for this sequence
cugccugauagggugcuugtt

SEQ ID NO: 1621 - DNA, 21 bp, Artificial Sequence
  Description of Artificial Sequence: Target Sequence/siNA sense region (stab04)
  misc_feature (1)..(1): 5'-3 attached terminal deoxyabasic moiety, inverted abasic, inverted nucleotide or other terminal cap that is optionally present
  misc_feature (21)..(21): 3'-3 attached terminal deoxyabasic moiety, inverted abasic, inverted nucleotide or other terminal cap that is optionally present
  misc_feature (1)..(1): 2'-deoxy-2'Fluoro
  misc_feature (3)..(5): 2'-deoxy-2'Fluoro
  misc_feature (8)..(8): 2'-deoxy-2'Fluoro
  misc_feature (13)..(13): 2'-deoxy-2'Fluoro
  misc_feature (15)..(17): 2'-deoxy-2'Fluoro
  misc_feature (19)..(19): 2'-deoxy-2'Fluoro
  misc_feature (1)..(19): ribonucleotide unmodified or modified as described for this sequence
ugccugauagggugcuugctt

SEQ ID NO: 1622 - DNA, 21 bp, Artificial Sequence
  Description of Artificial Sequence: Target Sequence/siNA sense region (stab04)
  misc_feature (1)..(1): 5'-3 attached terminal deoxyabasic moiety, inverted abasic, inverted nucleotide or other terminal cap that is optionally present
  misc_feature (21)..(21): 3'-3 attached terminal deoxyabasic moiety, inverted abasic, inverted nucleotide or other terminal cap that is optionally present
  misc_feature (1)..(3): 2'-deoxy-2'Fluoro
  misc_feature (6)..(6): 2'-deoxy-2'Fluoro
  misc_feature (11)..(11): 2'-deoxy-2'Fluoro
  misc_feature (13)..(15): 2'-deoxy-2'Fluoro
  misc_feature (17)..(17): 2'-deoxy-2'Fluoro
  misc_feature (1)..(19): ribonucleotide unmodified or modified as described for this sequence
ccugauagggugcuugcgatt

SEQ ID NO: 1623 - DNA, 21 bp, Artificial Sequence
  Description of Artificial Sequence: Target Sequence/siNA sense region (stab04)
  misc_feature (1)..(1): 5'-3 attached terminal deoxyabasic moiety, inverted abasic, inverted nucleotide or other terminal cap that is optionally present
  misc_feature (21)..(21): 3'-3 attached terminal deoxyabasic moiety, inverted abasic, inverted nucleotide or other terminal cap that is optionally present
  misc_feature (3)..(3): 2'-deoxy-2'Fluoro
  misc_feature (8)..(8): 2'-deoxy-2'Fluoro
  misc_feature (10)..(12): 2'-deoxy-2'Fluoro
  misc_feature (14)..(14): 2'-deoxy-2'Fluoro
  misc_feature (18)..(18): 2'-deoxy-2'Fluoro
  misc_feature (1)..(19): ribonucleotide unmodified or modified as described for this sequence
gauagggugcuugcgagugtt

SEQ ID NO: 1624 - DNA, 21 bp, Artificial Sequence
  Description of Artificial Sequence: Target Sequence/siNA antisense region (stab05)
  misc_feature (20)..(20): Phosphorothioate or Phosphorodithioate 3'-Internucleotide Linkage (optionally present)
  misc_feature (2)..(3): 2'-deoxy-2'Fluoro
  misc_feature (6)..(9): 2'-deoxy-2'Fluoro
  misc_feature (11)..(11): 2'-deoxy-2'Fluoro
  misc_feature (15)..(16): 2'-deoxy-2'Fluoro
  misc_feature (18)..(19): 2'-deoxy-2'Fluoro
  misc_feature (1)..(19): ribonucleotide unmodified or modified as described for this sequence
accgguuccgcagaccacutt

SEQ ID NO: 1625 - DNA, 21 bp, Artificial Sequence
  Description of Artificial Sequence: Target Sequence/siNA antisense region (stab05)
  misc_feature (20)..(20): Phosphorothioate or Phosphorodithioate 3'-Internucleotide Linkage (optionally present)
  misc_feature (2)..(2): 2'-deoxy-2'Fluoro
  misc_feature (4)..(6): 2'-deoxy-2'Fluoro
  misc_feature (8)..(9): 2'-deoxy-2'Fluoro
  misc_feature (12)..(15): 2'-deoxy-2'Fluoro
  misc_feature (17)..(17): 2'-deoxy-2'Fluoro
  misc_feature (1)..(19): ribonucleotide unmodified or modified as described for this sequence
guacucaccgguuccgcagtt

SEQ ID NO: 1626 - DNA, 21 bp, Artificial Sequence
  Description of Artificial Sequence: Target Sequence/siNA antisense region (stab05)
  misc_feature (20)..(20): Phosphorothioate or Phosphorodithioate 3'-Internucleotide Linkage (optionally present)
  misc_feature (4)..(4): 2'-deoxy-2'Fluoro
  misc_feature (7)..(7): 2'-deoxy-2'Fluoro
  misc_feature (9)..(10): 2'-deoxy-2'Fluoro
  misc_feature (12)..(12): 2'-deoxy-2'Fluoro
  misc_feature (17)..(19): 2'-deoxy-2'Fluoro
  misc_feature (1)..(19): ribonucleotide unmodified or modified as described for this sequence
aggcaguaccacaaggccutt

SEQ ID NO: 1627 - DNA, 21 bp, Artificial Sequence
  Description of Artificial Sequence: Target Sequence/siNA antisense region (stab05)
  misc_feature (20)..(20): Phosphorothioate or Phosphorodithioate 3'-Internucleotide Linkage (optionally present)
  misc_feature (1)..(1): 2'-deoxy-2'Fluoro
  misc_feature (3)..(4): 2'-deoxy-2'Fluoro
  misc_feature (8)..(8): 2'-deoxy-2'Fluoro
  misc_feature (11)..(11): 2'-deoxy-2'Fluoro
  misc_feature (13)..(14): 2'-deoxy-2'Fluoro
  misc_feature (16)..(16): 2'-deoxy-2'Fluoro
  misc_feature (1)..(19): ribonucleotide unmodified or modified as described for this sequence
uaucaggcaguaccacaagtt

SEQ ID NO: 1628 - DNA, 21 bp, Artificial Sequence
  Description of Artificial Sequence: Target Sequence/siNA antisense region (stab05)
  misc_feature (20)..(20): Phosphorothioate or Phosphorodithioate 3'-Internucleotide Linkage (optionally present)
  misc_feature (2)..(5): 2'-deoxy-2'Fluoro
  misc_feature (7)..(8): 2'-deoxy-2'Fluoro
  misc_feature (12)..(12): 2'-deoxy-2'Fluoro
  misc_feature (15)..(15): 2'-deoxy-2'Fluoro
  misc_feature (17)..(18): 2'-deoxy-2'Fluoro
  misc_feature (1)..(19): ribonucleotide unmodified or modified as described for this sequence
acccuaucaggcaguaccatt

SEQ ID NO: 1629 - DNA, 21 bp, Artificial Sequence
  Description of Artificial Sequence: Target Sequence/siNA antisense region (stab05)
  misc_feature (20)..(20): Phosphorothioate or Phosphorodithioate 3'-Internucleotide Linkage (optionally present)
  misc_feature (1)..(1): 2'-deoxy-2'Fluoro
  misc_feature (3)..(6): 2'-deoxy-2'Fluoro
  misc_feature (8)..(9): 2'-deoxy-2'Fluoro
  misc_feature (13)..(13): 2'-deoxy-2'Fluoro
  misc_feature (16)..(16): 2'-deoxy-2'Fluoro
  misc_feature (18)..(19): 2'-deoxy-2'Fluoro
  misc_feature (1)..(19): ribonucleotide unmodified or modified as described for this sequence
cacccuaucaggcaguacctt

SEQ ID NO: 1630 - DNA, 21 bp, Artificial Sequence
  Description of Artificial Sequence: Target Sequence/siNA antisense region (stab05)
  misc_feature (20)..(20): Phosphorothioate or Phosphorodithioate 3'-Internucleotide Linkage (optionally present)
  misc_feature (2)..(2): 2'-deoxy-2'Fluoro
  misc_feature (4)..(7): 2'-deoxy-2'Fluoro
  misc_feature (9)..(10): 2'-deoxy-2'Fluoro
  misc_feature (14)..(14): 2'-deoxy-2'Fluoro
  misc_feature (17)..(17): 2'-deoxy-2'Fluoro
  misc_feature (19)..(19): 2'-deoxy-2'Fluoro
  misc_feature (1)..(19): ribonucleotide unmodified or modified as described for this sequence
gcacccuaucaggcaguactt

SEQ ID NO: 1631 - DNA, 21 bp, Artificial Sequence
  Description of Artificial Sequence: Target Sequence/siNA antisense region (stab05)
  misc_feature (20)..(20): Phosphorothioate or Phosphorodithioate 3'-Internucleotide Linkage (optionally present)
  misc_feature (3)..(3): 2'-deoxy-2'Fluoro
  misc_feature (5)..(8): 2'-deoxy-2'Fluoro
  misc_feature (10)..(11): 2'-deoxy-2'Fluoro
  misc_feature (15)..(15): 2'-deoxy-2'Fluoro
  misc_feature (18)..(18): 2'-deoxy-2'Fluoro
  misc_feature (1)..(19): ribonucleotide unmodified or modified as described for this sequence
agcacccuaucaggcaguatt

SEQ ID NO: 1632 - DNA, 21 bp, Artificial Sequence
  Description of Artificial Sequence: Target Sequence/siNA antisense region (stab05)
  misc_feature (20)..(20): Phosphorothioate or Phosphorodithioate 3'-Internucleotide Linkage (optionally present)
  misc_feature (1)..(1): 2'-deoxy-2'Fluoro
  misc_feature (5)..(5): 2'-deoxy-2'Fluoro
  misc_feature (7)..(10): 2'-deoxy-2'Fluoro
  misc_feature (12)..(13): 2'-deoxy-2'Fluoro
  misc_feature (17)..(17): 2'-deoxy-2'Fluoro
  misc_feature (1)..(19): ribonucleotide unmodified or modified as described for this sequence
caagcacccuaucaggcagtt

SEQ ID NO: 1633 - DNA, 21 bp, Artificial Sequence
  Description of Artificial Sequence: Target Sequence/siNA antisense region (stab05)
  misc_feature (20)..(20): Phosphorothioate or Phosphorodithioate 3'-Internucleotide Linkage (optionally present)
  misc_feature (2)..(2): 2'-deoxy-2'Fluoro
  misc_feature (6)..(6): 2'-deoxy-2'Fluoro
  misc_feature (8)..(11): 2'-deoxy-2'Fluoro
  misc_feature (13)..(14): 2'-deoxy-2'Fluoro
  misc_feature (18)..(18): 2'-deoxy-2'Fluoro
  misc_feature (1)..(19): ribonucleotide unmodified or modified as described for this sequence
gcaagcacccuaucaggcatt

SEQ ID NO: 1634 - DNA, 21 bp, Artificial Sequence
  Description of Artificial Sequence: Target Sequence/siNA antisense region (stab05)
  misc_feature (20)..(20): Phosphorothioate or Phosphorodithioate 3'-Internucleotide Linkage (optionally present)
  misc_feature (1)..(2): 2'-deoxy-2'Fluoro
  misc_feature (4)..(4): 2'-deoxy-2'Fluoro
  misc_feature (8)..(8): 2'-deoxy-2'Fluoro
  misc_feature (10)..(13): 2'-deoxy-2'Fluoro
  misc_feature (15)..(16): 2'-deoxy-2'Fluoro
  misc_feature (1)..(19): ribonucleotide unmodified or modified as described for this sequence
ucgcaagcacccuaucaggtt

SEQ ID NO: 1635 - DNA, 21 bp, Artificial Sequence
  Description of Artificial Sequence: Target Sequence/siNA antisense region (stab05)
  misc_feature (20)..(20): Phosphorothioate or Phosphorodithioate 3'-Internucleotide Linkage (optionally present)
  misc_feature (1)..(1): 2'-deoxy-2'Fluoro
  misc_feature (3)..(5): 2'-deoxy-2'Fluoro
  misc_feature (7)..(7): 2'-deoxy-2'Fluoro
  misc_feature (11)..(11): 2'-deoxy-2'Fluoro
  misc_feature (13)..(16): 2'-deoxy-2'Fluoro
  misc_feature (18)..(19): 2'-deoxy-2'Fluoro
  misc_feature (1)..(19): ribonucleotide unmodified or modified as described for this sequence
cacucgcaagcacccuauctt

SEQ ID NO: 1636 - DNA, 21 bp, Artificial Sequence
  Description of Artificial Sequence: Target Sequence/siNA sense region (stab04)
  misc_feature (1)..(1): 5'-3 attached terminal deoxyabasic moiety, inverted abasic, inverted nucleotide or other terminal cap that is optionally present
  misc_feature (21)..(21): 3'-3 attached terminal deoxyabasic moiety, inverted abasic, inverted nucleotide or other terminal cap that is optionally present
  misc_feature (1)..(1): 2'-deoxy-2'Fluoro
  misc_feature (4)..(5): 2'-deoxy-2'Fluoro
  misc_feature (10)..(10): 2'-deoxy-2'Fluoro
  misc_feature (12)..(14): 2'-deoxy-2'Fluoro
  misc_feature (17)..(17): 2'-deoxy-2'Fluoro
  misc_feature (1)..(19): ribonucleotide unmodified or modified as described for this sequence
uggccaaggcgucuggugatt

SEQ ID NO: 1637 - DNA, 21 bp, Artificial Sequence
  Description of Artificial Sequence: Target Sequence/siNA sense region (stab04)
  misc_feature (1)..(1): 5'-3 attached terminal deoxyabasic moiety, inverted abasic, inverted nucleotide or other terminal cap that is optionally present
  misc_feature (21)..(21): 3'-3 attached terminal deoxyabasic moiety, inverted abasic, inverted nucleotide or other terminal cap that is optionally present
  misc_feature (1)..(1): 2'-deoxy-2'Fluoro
  misc_feature (3)..(3): 2'-deoxy-2'Fluoro
  misc_feature (7)..(7): 2'-deoxy-2'Fluoro
  misc_feature (10)..(11): 2'-deoxy-2'Fluoro
  misc_feature (16)..(16): 2'-deoxy-2'Fluoro
  misc_feature (18)..(19): 2'-deoxy-2'Fluoro
  misc_feature (1)..(19): ribonucleotide unmodified or modified as described for this sequence
caugaguggccaaggcguctt

SEQ ID NO: 1638 - DNA, 21 bp, Artificial Sequence
  Description of Artificial Sequence: Target Sequence/siNA sense region (stab04)
  misc_feature (1)..(1): 5'-3 attached terminal deoxyabasic moiety, inverted abasic, inverted nucleotide or other terminal cap that is optionally present
  misc_feature (21)..(21): 3'-3 attached terminal deoxyabasic moiety, inverted abasic, inverted nucleotide or other terminal cap that is optionally present
  misc_feature (1)..(3): 2'-deoxy-2'Fluoro
  misc_feature (5)..(6): 2'-deoxy-2'Fluoro
  misc_feature (8)..(8): 2'-deoxy-2'Fluoro
  misc_feature (11)..(11): 2'-deoxy-2'Fluoro
  misc_feature (13)..(16): 2'-deoxy-2'Fluoro
  misc_feature (1)..(19): ribonucleotide unmodified or modified as described for this sequence
uccgucaugguguuccggatt

SEQ ID NO: 1639 - DNA, 21 bp, Artificial Sequence
  Description of Artificial Sequence: Target Sequence/siNA sense region (stab04)
  misc_feature (1)..(1): 5'-3 attached terminal deoxyabasic moiety, inverted abasic, inverted nucleotide or other terminal cap that is optionally present
  misc_feature (21)..(21): 3'-3 attached terminal deoxyabasic moiety, inverted abasic, inverted nucleotide or other terminal cap that is optionally present
  misc_feature (2)..(2): 2'-deoxy-2'Fluoro
  misc_feature (5)..(7): 2'-deoxy-2'Fluoro
  misc_feature (9)..(10): 2'-deoxy-2'Fluoro
  misc_feature (12)..(12): 2'-deoxy-2'Fluoro
  misc_feature (15)..(15): 2'-deoxy-2'Fluoro
  misc_feature (17)..(19): 2'-deoxy-2'Fluoro
  misc_feature (1)..(19): ribonucleotide unmodified or modified as described for this sequence
auaguccgucaugguguuctt

SEQ ID NO: 1640 - DNA, 21 bp, Artificial Sequence
  Description of Artificial Sequence: Target Sequence/siNA sense region (stab04)
  misc_feature (1)..(1): 5'-3 attached terminal deoxyabasic moiety, inverted abasic, inverted nucleotide or other terminal cap that is optionally present
  misc_feature (21)..(21): 3'-3 attached terminal deoxyabasic moiety, inverted abasic, inverted nucleotide or other terminal cap that is optionally present
  misc_feature (1)..(1): 2'-deoxy-2'Fluoro
  misc_feature (6)..(6): 2'-deoxy-2'Fluoro
  misc_feature (9)..(11): 2'-deoxy-2'Fluoro
  misc_feature (13)..(14): 2'-deoxy-2'Fluoro
  misc_feature (16)..(16): 2'-deoxy-2'Fluoro
  misc_feature (19)..(19): 2'-deoxy-2'Fluoro
  misc_feature (1)..(19): ribonucleotide unmodified or modified as described for this sequence
ugggauaguccgucauggutt

SEQ ID NO: 1641 - DNA, 21 bp, Artificial Sequence
  Description of Artificial Sequence: Target Sequence/siNA sense region (stab04)
  misc_feature (1)..(1): 5'-3 attached terminal deoxyabasic moiety, inverted abasic, inverted nucleotide or other terminal cap that is optionally present
  misc_feature (21)..(21): 3'-3 attached terminal deoxyabasic moiety, inverted abasic, inverted nucleotide or other terminal cap that is optionally present
  misc_feature (2)..(2): 2'-deoxy-2'Fluoro
  misc_feature (7)..(7): 2'-deoxy-2'Fluoro
  misc_feature (10)..(12): 2'-deoxy-2'Fluoro
  misc_feature (14)..(15): 2'-deoxy-2'Fluoro
  misc_feature (17)..(17): 2'-deoxy-2'Fluoro
  misc_feature (1)..(19): ribonucleotide unmodified or modified as described for this sequence
gugggauaguccgucauggtt

SEQ ID NO: 1642 - DNA, 21 bp, Artificial Sequence
  Description of Artificial Sequence: Target Sequence/siNA sense region (stab04)
  misc_feature (1)..(1): 5'-3 attached terminal deoxyabasic moiety, inverted abasic, inverted nucleotide or other terminal cap that is optionally present
  misc_feature (21)..(21): 3'-3 attached terminal deoxyabasic moiety, inverted abasic, inverted nucleotide or other terminal cap that is optionally present
  misc_feature (1)..(1): 2'-deoxy-2'Fluoro
  misc_feature (3)..(3): 2'-deoxy-2'Fluoro
  misc_feature (8)..(8): 2'-deoxy-2'Fluoro
  misc_feature (11)..(13): 2'-deoxy-2'Fluoro
  misc_feature (15)..(16): 2'-deoxy-2'Fluoro
  misc_feature (18)..(18): 2'-deoxy-2'Fluoro
  misc_feature (1)..(19): ribonucleotide unmodified or modified as described for this sequence
cgugggauaguccgucaugtt

SEQ ID NO: 1643 - DNA, 21 bp, Artificial Sequence
  Description of Artificial Sequence: Target Sequence/siNA sense region (stab04)
  misc_feature (1)..(1): 5'-3 attached terminal deoxyabasic moiety, inverted abasic, inverted nucleotide or other terminal cap that is optionally present
  misc_feature (21)..(21): 3'-3 attached terminal deoxyabasic moiety, inverted abasic, inverted nucleotide or other terminal cap that is optionally present
  misc_feature (1)..(2): 2'-deoxy-2'Fluoro
  misc_feature (4)..(4): 2'-deoxy-2'Fluoro
  misc_feature (9)..(9): 2'-deoxy-2'Fluoro
  misc_feature (12)..(14): 2'-deoxy-2'Fluoro
  misc_feature (16)..(17): 2'-deoxy-2'Fluoro
  misc_feature (19)..(19): 2'-deoxy-2'Fluoro
  misc_feature (1)..(19): ribonucleotide unmodified or modified as described for this sequence
ucgugggauaguccgucautt

SEQ ID NO: 1644 - DNA, 21 bp, Artificial Sequence
  Description of Artificial Sequence: Target Sequence/siNA sense region (stab04)
  misc_feature (1)..(1): 5'-3 attached terminal deoxyabasic moiety, inverted abasic, inverted nucleotide or other terminal cap that is optionally present
  misc_feature (21)..(21): 3'-3 attached terminal deoxyabasic moiety, inverted abasic, inverted nucleotide or other terminal cap that is optionally present
  misc_feature (2)..(4): 2'-deoxy-2'Fluoro
  misc_feature (6)..(6): 2'-deoxy-2'Fluoro
  misc_feature (11)..(11): 2'-deoxy-2'Fluoro
  misc_feature (14)..(16): 2'-deoxy-2'Fluoro
  misc_feature (18)..(19): 2'-deoxy-2'Fluoro
  misc_feature (1)..(19): ribonucleotide unmodified or modified as described for this sequence
guucgugggauaguccguctt

SEQ ID NO: 1645 - DNA, 21 bp, Artificial Sequence
  Description of Artificial Sequence: Target Sequence/siNA sense region (stab04)
  misc_feature (1)..(1): 5'-3 attached terminal deoxyabasic moiety, inverted abasic, inverted nucleotide or other terminal cap that is optionally present
  misc_feature (21)..(21): 3'-3 attached terminal deoxyabasic moiety, inverted abasic, inverted nucleotide or other terminal cap that is optionally present
  misc_feature (1)..(1): 2'-deoxy-2'Fluoro
  misc_feature (3)..(5): 2'-deoxy-2'Fluoro
  misc_feature (7)..(7): 2'-deoxy-2'Fluoro
  misc_feature (12)..(12): 2'-deoxy-2'Fluoro
  misc_feature (15)..(17): 2'-deoxy-2'Fluoro
  misc_feature (19)..(19): 2'-deoxy-2'Fluoro
  misc_feature (1)..(19): ribonucleotide unmodified or modified as described for this sequence
cguucgugggauaguccgutt

SEQ ID NO: 1646 - DNA, 21 bp, Artificial Sequence
  Description of Artificial Sequence: Target Sequence/siNA sense region (stab04)
  misc_feature (1)..(1): 5'-3 attached terminal deoxyabasic moiety, inverted abasic, inverted nucleotide or other terminal cap that is optionally present
  misc_feature (21)..(21): 3'-3 attached terminal deoxyabasic moiety, inverted abasic, inverted nucleotide or other terminal cap that is optionally present
  misc_feature (3)..(3): 2'-deoxy-2'Fluoro
  misc_feature (5)..(7): 2'-deoxy-2'Fluoro
  misc_feature (9)..(9): 2'-deoxy-2'Fluoro
  misc_feature (14)..(14): 2'-deoxy-2'Fluoro
  misc_feature (17)..(19): 2'-deoxy-2'Fluoro
  misc_feature (1)..(19): ribonucleotide unmodified or modified as described for this sequence
agcguucgugggauagucctt

SEQ ID NO: 1647 - DNA, 21 bp, Artificial Sequence
  Description of Artificial Sequence: Target Sequence/siNA sense region (stab04)
  misc_feature (1)..(1): 5'-3 attached terminal deoxyabasic moiety, inverted abasic, inverted nucleotide or other terminal cap that is optionally present
  misc_feature (21)..(21): 3'-3 attached terminal deoxyabasic moiety, inverted abasic, inverted nucleotide or other terminal cap that is optionally present
  misc_feature (2)..(2): 2'-deoxy-2'Fluoro
  misc_feature (6)..(6): 2'-deoxy-2'Fluoro
  misc_feature (8)..(10): 2'-deoxy-2'Fluoro
  misc_feature (12)..(12): 2'-deoxy-2'Fluoro
  misc_feature (17)..(17): 2'-deoxy-2'Fluoro
  misc_feature (1)..(19): ribonucleotide unmodified or modified as described for this sequence
gugagcguucgugggauagtt

SEQ ID NO: 1648 - DNA, 21 bp, Artificial Sequence
  Description of Artificial Sequence: Target Sequence/siNA antisense region (stab05)
  misc_feature (20)..(20): Phosphorothioate or Phosphorodithioate 3'-Internucleotide Linkage (optionally present)
  misc_feature (1)..(2): 2'-deoxy-2'Fluoro
  misc_feature (4)..(5): 2'-deoxy-2'Fluoro
  misc_feature (9)..(9): 2'-deoxy-2'Fluoro
  misc_feature (11)..(14): 2'-deoxy-2'Fluoro
  misc_feature (17)..(18): 2'-deoxy-2'Fluoro
  misc_feature (1)..(19): ribonucleotide unmodified or modified as described for this sequence
ucaccagacgccuuggccatt

SEQ ID NO: 1649 - DNA, 21 bp, Artificial Sequence
  Description of Artificial Sequence: Target Sequence/siNA antisense region (stab05)
  misc_feature (20)..(20): Phosphorothioate or Phosphorodithioate 3'-Internucleotide Linkage (optionally present)
  misc_feature (2)..(3): 2'-deoxy-2'Fluoro
  misc_feature (5)..(8): 2'-deoxy-2'Fluoro
  misc_feature (11)..(12): 2'-deoxy-2'Fluoro
  misc_feature (14)..(16): 2'-deoxy-2'Fluoro
  misc_feature (18)..(18): 2'-deoxy-2'Fluoro
  misc_feature (1)..(19): ribonucleotide unmodified or modified as described for this sequence
gacgccuuggccacucaugtt

SEQ ID NO: 1650 - DNA, 21 bp, Artificial Sequence
  Description of Artificial Sequence: Target Sequence/siNA antisense region (stab05)
  misc_feature (20)..(20): Phosphorothioate or Phosphorodithioate 3'-Internucleotide Linkage (optionally present)
  misc_feature (1)..(3): 2'-deoxy-2'Fluoro
  misc_feature (8)..(8): 2'-deoxy-2'Fluoro
  misc_feature (10)..(11): 2'-deoxy-2'Fluoro
  misc_feature (13)..(13): 2'-deoxy-2'Fluoro
  misc_feature (16)..(16): 2'-deoxy-2'Fluoro
  misc_feature (1)..(19): ribonucleotide unmodified or modified as described for this sequence
uccggaacaccaugacggatt

SEQ ID NO: 1651 - DNA, 21 bp, Artificial Sequence
  Description of Artificial Sequence: Target Sequence/siNA antisense region (stab05)
  misc_feature (20)..(20): Phosphorothioate or Phosphorodithioate 3'-Internucleotide Linkage (optionally present)
  misc_feature (4)..(4): 2'-deoxy-2'Fluoro
  misc_feature (6)..(7): 2'-deoxy-2'Fluoro
  misc_feature (9)..(9): 2'-deoxy-2'Fluoro
  misc_feature (12)..(12): 2'-deoxy-2'Fluoro
  misc_feature (16)..(17): 2'-deoxy-2'Fluoro
  misc_feature (19)..(19): 2'-deoxy-2'Fluoro
  misc_feature (1)..(19): ribonucleotide unmodified or modified as described for this sequence
gaacaccaugacggacuautt

SEQ ID NO: 1652 - DNA, 21 bp, Artificial Sequence
  Description of Artificial Sequence: Target Sequence/siNA antisense region (stab05)
  misc_feature (20)..(20): Phosphorothioate or Phosphorodithioate 3'-Internucleotide Linkage (optionally present)
  misc_feature (2)..(3): 2'-deoxy-2'Fluoro
  misc_feature (5)..(5): 2'-deoxy-2'Fluoro
  misc_feature (8)..(8): 2'-deoxy-2'Fluoro
  misc_feature (12)..(13): 2'-deoxy-2'Fluoro
  misc_feature (15)..(18): 2'-deoxy-2'Fluoro
  misc_feature (1)..(19): ribonucleotide unmodified or modified as described for this sequence
accaugacggacuaucccatt

SEQ ID NO: 1653 - DNA, 21 bp, Artificial Sequence
  Description of Artificial Sequence: Target Sequence/siNA antisense region (stab05)
  misc_feature (20)..(20): Phosphorothioate or Phosphorodithioate 3'-Internucleotide Linkage (optionally present)
  misc_feature (1)..(2): 2'-deoxy-2'Fluoro
  misc_feature (4)..(4): 2'-deoxy-2'Fluoro
  misc_feature (7)..(7): 2'-deoxy-2'Fluoro
  misc_feature (11)..(12): 2'-deoxy-2'Fluoro
  misc_feature (14)..(17): 2'-deoxy-2'Fluoro
  misc_feature (19)..(19): 2'-deoxy-2'Fluoro
  misc_feature (1)..(19): ribonucleotide unmodified or modified as described for this sequence
ccaugacggacuaucccactt

SEQ ID NO: 1654 - DNA, 21 bp, Artificial Sequence
  Description of Artificial Sequence: Target Sequence/siNA antisense region (stab05)
  misc_feature (20)..(20): Phosphorothioate or Phosphorodithioate 3'-Internucleotide Linkage (optionally present)
  misc_feature (1)..(1): 2'-deoxy-2'Fluoro
  misc_feature (3)..(3): 2'-deoxy-2'Fluoro
  misc_feature (6)..(6): 2'-deoxy-2'Fluoro
  misc_feature (10)..(11): 2'-deoxy-2'Fluoro
  misc_feature (13)..(16): 2'-deoxy-2'Fluoro
  misc_feature (18)..(18): 2'-deoxy-2'Fluoro
  misc_feature (1)..(19): ribonucleotide unmodified or modified as described for this sequence
caugacggacuaucccacgtt

SEQ ID NO: 1655 - DNA, 21 bp, Artificial Sequence
  Description of Artificial Sequence: Target Sequence/siNA antisense region (stab05)
  misc_feature (20)..(20): Phosphorothioate or Phosphorodithioate 3'-Internucleotide Linkage (optionally present)
  misc_feature (2)..(2): 2'-deoxy-2'Fluoro
  misc_feature (5)..(5): 2'-deoxy-2'Fluoro
  misc_feature (9)..(10): 2'-deoxy-2'Fluoro
  misc_feature (12)..(15): 2'-deoxy-2'Fluoro
  misc_feature (17)..(17): 2'-deoxy-2'Fluoro
  misc_feature (1)..(19): ribonucleotide unmodified or modified as described for this sequence
augacggacuaucccacgatt

SEQ ID NO: 1656 - DNA, 21 bp, Artificial Sequence
  Description of Artificial Sequence: Target Sequence/siNA antisense region (stab05)
  misc_feature (20)..(20): Phosphorothioate or Phosphorodithioate 3'-Internucleotide Linkage (optionally present)
  misc_feature (3)..(3): 2'-deoxy-2'Fluoro
  misc_feature (7)..(8): 2'-deoxy-2'Fluoro
  misc_feature (10)..(13): 2'-deoxy-2'Fluoro
  misc_feature (15)..(15): 2'-deoxy-2'Fluoro
  misc_feature (19)..(19): 2'-deoxy-2'Fluoro
  misc_feature (1)..(19): ribonucleotide unmodified or modified as described for this sequence
gacggacuaucccacgaactt

SEQ ID NO: 1657 - DNA, 21 bp, Artificial Sequence
  Description of Artificial Sequence: Target Sequence/siNA antisense region (stab05)
  misc_feature (20)..(20): Phosphorothioate or Phosphorodithioate 3'-Internucleotide Linkage (optionally present)
  misc_feature (2)..(2): 2'-deoxy-2'Fluoro
  misc_feature (6)..(7): 2'-deoxy-2'Fluoro
  misc_feature (9)..(12): 2'-deoxy-2'Fluoro
  misc_feature (14)..(14): 2'-deoxy-2'Fluoro
  misc_feature (18)..(18): 2'-deoxy-2'Fluoro
  misc_feature (1)..(19): ribonucleotide unmodified or modified as described for this sequence
acggacuaucccacgaacgtt

SEQ ID NO: 1658 - DNA, 21 bp, Artificial Sequence
  Description of Artificial Sequence: Target Sequence/siNA antisense region (stab05)
  misc_feature (20)..(20): Phosphorothioate or Phosphorodithioate 3'-Internucleotide Linkage (optionally present)
  misc_feature (4)..(5): 2'-deoxy-2'Fluoro
  misc_feature (7)..(10): 2'-deoxy-2'Fluoro
  misc_feature (12)..(12): 2'-deoxy-2'Fluoro
  misc_feature (16)..(16): 2'-deoxy-2'Fluoro
  misc_feature (18)..(19): 2'-deoxy-2'Fluoro
  misc_feature (1)..(19): ribonucleotide unmodified or modified as described for this sequence
ggacuaucccacgaacgcutt

SEQ ID NO: 1659 - DNA, 21 bp, Artificial Sequence
  Description of Artificial Sequence: Target Sequence/siNA antisense region (stab05)
  misc_feature (20)..(20): Phosphorothioate or Phosphorodithioate 3'-Internucleotide Linkage (optionally present)
  misc_feature (1)..(2): 2'-deoxy-2'Fluoro
  misc_feature (4)..(7): 2'-deoxy-2'Fluoro
  misc_feature (9)..(9): 2'-deoxy-2'Fluoro
  misc_feature (13)..(13): 2'-deoxy-2'Fluoro
  misc_feature (15)..(17): 2'-deoxy-2'Fluoro
  misc_feature (19)..(19): 2'-deoxy-2'Fluoro
  misc_feature (1)..(19): ribonucleotide unmodified or modified as described for this sequence
cuaucccacgaacgcucactt

SEQ ID NO: 1660 - DNA, 21 bp, Artificial Sequence
  Description of Artificial Sequence: Target Sequence/siNA sense region (stab04)
  misc_feature (1)..(1): 5'-3 attached terminal deoxyabasic moiety, inverted abasic, inverted nucleotide or other terminal cap that is optionally present
  misc_feature (21)..(21): 3'-3 attached terminal deoxyabasic moiety, inverted abasic, inverted nucleotide or other terminal cap that is optionally present
  misc_feature (2)..(10): 2'-deoxy-2'Fluoro
  misc_feature (14)..(15): 2'-deoxy-2'Fluoro
  misc_feature (18)..(19): 2'-deoxy-2'Fluoro
  misc_feature (1)..(19): ribonucleotide unmodified or modified as described for this sequence
guccuuucuuggaucaacctt

SEQ ID NO: 1661 - DNA, 21 bp, Artificial Sequence
  Description of Artificial Sequence: Target Sequence/siNA sense region (stab04)
  misc_feature (1)..(1): 5'-3 attached terminal deoxyabasic moiety, inverted abasic, inverted nucleotide or other terminal cap that is optionally present
  misc_feature (21)..(21): 3'-3 attached terminal deoxyabasic moiety, inverted abasic, inverted nucleotide or other terminal cap that is optionally present
  misc_feature (1)..(9): 2'-deoxy-2'Fluoro
  misc_feature (13)..(14): 2'-deoxy-2'Fluoro
  misc_feature (17)..(19): 2'-deoxy-2'Fluoro
  misc_feature (1)..(19): ribonucleotide unmodified or modified as described for this sequence
uccuuucuuggaucaaccctt

SEQ ID NO: 1662 - DNA, 21 bp, Artificial Sequence
  Description of Artificial Sequence: Target Sequence/siNA sense region (stab04)
  misc_feature (1)..(1): 5'-3 attached terminal deoxyabasic moiety, inverted abasic, inverted nucleotide or other terminal cap that is optionally present
  misc_feature (21)..(21): 3'-3 attached terminal deoxyabasic moiety, inverted abasic, inverted nucleotide or other terminal cap that is optionally present
  misc_feature (3)..(11): 2'-deoxy-2'Fluoro
  misc_feature (15)..(16): 2'-deoxy-2'Fluoro
  misc_feature (19)..(19): 2'-deoxy-2'Fluoro
  misc_feature (1)..(19): ribonucleotide unmodified or modified as described for this sequence
gguccuuucuuggaucaactt

SEQ ID NO: 1663 - DNA, 21 bp, Artificial Sequence
  Description of Artificial Sequence: Target Sequence/siNA sense region (stab04)
  misc_feature (1)..(1): 5'-3 attached terminal deoxyabasic moiety, inverted abasic, inverted nucleotide or other terminal cap that is optionally present
  misc_feature (21)..(21): 3'-3 attached terminal deoxyabasic moiety, inverted abasic, inverted nucleotide or other terminal cap that is optionally present
  misc_feature (1)..(2): 2'-deoxy-2'Fluoro
  misc_feature (6)..(14): 2'-deoxy-2'Fluoro
  misc_feature (18)..(19): 2'-deoxy-2'Fluoro
  misc_feature (1)..(19): ribonucleotide unmodified or modified as described for this sequence
ccggguccuuucuuggauctt

SEQ ID NO: 1664 - DNA, 21 bp, Artificial Sequence
  Description of Artificial Sequence: Target Sequence/siNA antisense region (stab05)
  misc_feature (20)..(20): Phosphorothioate or Phosphorodithioate 3'-Internucleotide Linkage (optionally present)
  misc_feature (3)..(4): 2'-deoxy-2'Fluoro
  misc_feature (7)..(9): 2'-deoxy-2'Fluoro
  misc_feature (19)..(19): 2'-deoxy-2'Fluoro
  misc_feature (1)..(19): ribonucleotide unmodified or modified as described for this sequence
gguugauccaagaaaggactt

SEQ ID NO: 1665 - DNA, 21 bp, Artificial Sequence
  Description of Artificial Sequence: Target Sequence/siNA antisense region (stab05)
  misc_feature (20)..(20): Phosphorothioate or Phosphorodithioate 3'-Internucleotide Linkage (optionally present)
  misc_feature (4)..(5): 2'-deoxy-2'Fluoro
  misc_feature (8)..(10): 2'-deoxy-2'Fluoro
  misc_feature (1)..(19): ribonucleotide unmodified or modified as described for this sequence
ggguugauccaagaaaggatt

SEQ ID NO: 1666 - DNA, 21 bp, Artificial Sequence
  Description of Artificial Sequence: Target Sequence/siNA antisense region (stab05)
  misc_feature (20)..(20): Phosphorothioate or Phosphorodithioate 3'-Internucleotide Linkage (optionally present)
  misc_feature (2)..(3): 2'-deoxy-2'Fluoro
  misc_feature (6)..(8): 2'-deoxy-2'Fluoro
  misc_feature (18)..(19): 2'-deoxy-2'Fluoro
  misc_feature (1)..(19): ribonucleotide unmodified or modified as described for this sequence
guugauccaagaaaggacctt

SEQ ID NO: 1667 - DNA, 21 bp, Artificial Sequence
  Description of Artificial Sequence: Target Sequence/siNA antisense region (stab05)
  misc_feature (20)..(20): Phosphorothioate or Phosphorodithioate 3'-Internucleotide Linkage (optionally present)
  misc_feature (3)..(5): 2'-deoxy-2'Fluoro
  misc_feature (15)..(17): 2'-deoxy-2'Fluoro
  misc_feature (1)..(19): ribonucleotide unmodified or modified as described for this sequence
gauccaagaaaggacccggtt

SEQ ID NO: 1668 - DNA, 21 bp, Artificial Sequence
  Description of Artificial Sequence: Target Sequence/siNA sense region (stab04)
  misc_feature (1)..(1): 5'-3 attached terminal deoxyabasic moiety, inverted abasic, inverted nucleotide or other terminal cap that is optionally present
  misc_feature (21)..(21): 3'-3 attached terminal deoxyabasic moiety, inverted abasic, inverted nucleotide or other terminal cap that is optionally present
  misc_feature (1)..(2): 2'-deoxy-2'Fluoro
  misc_feature (5)..(6): 2'-deoxy-2'Fluoro
  misc_feature (10)..(18): 2'-deoxy-2'Fluoro
  misc_feature (1)..(19): ribonucleotide unmodified or modified as described for this sequence
ccaacuagguucuuuccugtt

SEQ ID NO: 1669 - DNA, 21 bp, Artificial Sequence
  Description of Artificial Sequence: Target Sequence/siNA sense region (stab04)
  misc_feature (1)..(1): 5'-3 attached terminal deoxyabasic moiety, inverted abasic, inverted nucleotide or other terminal cap that is optionally present
  misc_feature (21)..(21): 3'-3 attached terminal deoxyabasic moiety, inverted abasic, inverted nucleotide or other terminal cap that is optionally present
  misc_feature (1)..(3): 2'-deoxy-2'Fluoro
  misc_feature (6)..(7): 2'-deoxy-2'Fluoro
  misc_feature (11)..(19): 2'-deoxy-2'Fluoro
  misc_feature (1)..(19): ribonucleotide unmodified or modified as described for this sequence
cccaacuagguucuuuccutt

SEQ ID NO: 1670 - DNA, 21 bp, Artificial Sequence
  Description of Artificial Sequence: Target Sequence/siNA sense region (stab04)
  misc_feature (1)..(1): 5'-3 attached terminal deoxyabasic moiety, inverted abasic, inverted nucleotide or other terminal cap that is optionally present
  misc_feature (21)..(21): 3'-3 attached terminal deoxyabasic moiety, inverted abasic, inverted nucleotide or other terminal cap that is optionally present
  misc_feature (1)..(1): 2'-deoxy-2'Fluoro
  misc_feature (4)..(5): 2'-deoxy-2'Fluoro
  misc_feature (9)..(17): 2'-deoxy-2'Fluoro
  misc_feature (1)..(19): ribonucleotide unmodified or modified as described for this sequence
caacuagguucuuuccuggtt

SEQ ID NO: 1671 - DNA, 21 bp, Artificial Sequence
  Description of Artificial Sequence: Target Sequence/siNA sense region (stab04)
  misc_feature (1)..(1): 5'-3 attached terminal deoxyabasic moiety, inverted abasic, inverted nucleotide or other terminal cap that is optionally present
  misc_feature (21)..(21): 3'-3 attached terminal deoxyabasic moiety, inverted abasic, inverted nucleotide or other terminal cap that is optionally present
  misc_feature (1)..(2): 2'-deoxy-2'Fluoro
  misc_feature (6)..(14): 2'-deoxy-2'Fluoro
  misc_feature (18)..(19): 2'-deoxy-2'Fluoro
  misc_feature (1)..(19): ribonucleotide unmodified or modified as described for this sequence
cuagguucuuuccugggcctt

SEQ ID NO: 1672 - DNA, 21 bp, Artificial Sequence
  Description of Artificial Sequence: Target Sequence/siNA antisense region (stab05)
  misc_feature (20)..(20): Phosphorothioate or Phosphorodithioate 3'-Internucleotide Linkage (optionally present)
  misc_feature (1)..(1): 2'-deoxy-2'Fluoro
  misc_feature (11)..(13): 2'-deoxy-2'Fluoro
  misc_feature (16)..(17): 2'-deoxy-2'Fluoro
  misc_feature (1)..(19): ribonucleotide unmodified or modified as described for this sequence
caggaaagaaccuaguuggtt

SEQ ID NO: 1673 - DNA, 21 bp, Artificial Sequence
  Description of Artificial Sequence: Target Sequence/siNA antisense region (stab05)
  misc_feature (20)..(20): Phosphorothioate or Phosphorodithioate 3'-Internucleotide Linkage (optionally present)
  misc_feature (10)..(12): 2'-deoxy-2'Fluoro
  misc_feature (15)..(16): 2'-deoxy-2'Fluoro
  misc_feature (1)..(19): ribonucleotide unmodified or modified as described for this sequence
aggaaagaaccuaguugggtt

SEQ ID NO: 1674 - DNA, 21 bp, Artificial Sequence
  Description of Artificial Sequence: Target Sequence/siNA antisense region (stab05)
  misc_feature (20)..(20): Phosphorothioate or Phosphorodithioate 3'-Internucleotide Linkage (optionally present)
  misc_feature (1)..(2): 2'-deoxy-2'Fluoro
  misc_feature (12)..(14): 2'-deoxy-2'Fluoro
  misc_feature (17)..(18): 2'-deoxy-2'Fluoro
  misc_feature (1)..(19): ribonucleotide unmodified or modified as described for this sequence
ccaggaaagaaccuaguugtt

SEQ ID NO: 1675 - DNA, 21 bp, Artificial Sequence
  Description of Artificial Sequence: Target Sequence/siNA antisense region (stab05)
  misc_feature (20)..(20): Phosphorothioate or Phosphorodithioate 3'-Internucleotide Linkage (optionally present)
  misc_feature (3)..(5): 2'-deoxy-2'Fluoro
  misc_feature (15)..(17): 2'-deoxy-2'Fluoro
  misc_feature (1)..(19): ribonucleotide unmodified or modified as described for this sequence
ggcccaggaaagaaccuagtt

SEQ ID NO: 1676 - DNA, 21 bp, Artificial Sequence
  Description of Artificial Sequence: Target Sequence/siNA sense region (stab07)
  misc_feature (1)..(1): 5'-3 attached terminal deoxyabasic moiety, inverted abasic, inverted nucleotide or other terminal cap that is optionally present
  misc_feature (21)..(21): 3'-3 attached terminal deoxyabasic moiety, inverted abasic, inverted nucleotide or other terminal cap that is optionally present
  misc_feature (1)..(3): 2'-deoxy-2'Fluoro
  misc_feature (4)..(9): 2'-deoxy
  misc_feature (10)..(13): 2'-deoxy-2'Fluoro
  misc_feature (14)..(14): 2'-deoxy
  misc_feature (15)..(15): 2'-deoxy-2'Fluoro
  misc_feature (16)..(18): 2'-deoxy
  misc_feature (19)..(19): 2'-deoxy-2'Fluoro
  misc_feature (1)..(19): ribonucleotide unmodified or modified as described for this sequence
cccgggaggucucguagactt

SEQ ID NO: 1677 - DNA, 21 bp, Artificial Sequence
  Description of Artificial Sequence: Target Sequence/siNA sense region (stab07)
  misc_feature (1)..(1): 5'-3 attached terminal deoxyabasic moiety, inverted abasic, inverted nucleotide or other terminal cap that is optionally present
  misc_feature (21)..(21): 3'-3 attached terminal deoxyabasic moiety, inverted abasic, inverted nucleotide or other terminal cap that is optionally present
  misc_feature (1)..(2): 2'-deoxy-2'Fluoro
  misc_feature (3)..(8): 2'-deoxy
  misc_feature (9)..(12): 2'-deoxy-2'Fluoro
  misc_feature (13)..(13): 2'-deoxy
  misc_feature (14)..(14): 2'-deoxy-2'Fluoro
  misc_feature (15)..(17): 2'-deoxy
  misc_feature (18)..(19): 2'-deoxy-2'Fluoro
  misc_feature (1)..(19): ribonucleotide unmodified or modified as described for this sequence
ccgggaggucucguagacctt

SEQ ID NO: 1678 - DNA, 21 bp, Artificial Sequence
  Description of Artificial Sequence: Target Sequence/siNA sense region (stab07)
  misc_feature (1)..(1): 5'-3 attached terminal deoxyabasic moiety, inverted abasic, inverted nucleotide or other terminal cap that is optionally present
  misc_feature (21)..(21): 3'-3 attached terminal deoxyabasic moiety, inverted abasic, inverted nucleotide or other terminal cap that is optionally present
  misc_feature (1)..(1): 2'-deoxy-2'Fluoro
  misc_feature (2)..(7): 2'-deoxy
  misc_feature (8)..(11): 2'-deoxy-2'Fluoro
  misc_feature (12)..(12): 2'-deoxy
  misc_feature (13)..(13): 2'-deoxy-2'Fluoro
  misc_feature (14)..(16): 2'-deoxy
  misc_feature (17)..(18): 2'-deoxy-2'Fluoro
  misc_feature (19)..(19): 2'-deoxy
  misc_feature (1)..(19): ribonucleotide unmodified or modified as described for this sequence
cgggaggucucguagaccgtt

SEQ ID NO: 1679 - DNA, 21 bp, Artificial Sequence
  Description of Artificial Sequence: Target Sequence/siNA sense region (stab07)
  misc_feature (1)..(1): 5'-3 attached terminal deoxyabasic moiety, inverted abasic, inverted nucleotide or other terminal cap that is optionally present
  misc_feature (21)..(21): 3'-3 attached terminal deoxyabasic moiety, inverted abasic, inverted nucleotide or other terminal cap that is optionally present
  misc_feature (1)..(6): 2'-deoxy
  misc_feature (7)..(10): 2'-deoxy-2'Fluoro
  misc_feature (11)..(11): 2'-deoxy
  misc_feature (12)..(12): 2'-deoxy-2'Fluoro
  misc_feature (13)..(15): 2'-deoxy
  misc_feature (16)..(17): 2'-deoxy-2'Fluoro
  misc_feature (18)..(18): 2'-deoxy
  misc_feature (19)..(19): 2'-deoxy-2'Fluoro
  misc_feature (1)..(19): ribonucleotide unmodified or modified as described for this sequence
gggaggucucguagaccgutt

SEQ ID NO: 1680 - DNA, 21 bp, Artificial Sequence
  Description of Artificial Sequence: Target Sequence/siNA antisense region (stab08)
  misc_feature (20)..(20): Phosphorothioate or Phosphorodithioate 3'-Internucleotide Linkage (optionally present)
  misc_feature (2)..(4): 2'-deoxy-2'Fluoro
  misc_feature (5)..(5): 2'-O-methyl
  misc_feature (6)..(6): 2'-deoxy-2'Fluoro
  misc_feature (7)..(10): 2'-O-methyl
  misc_feature (11)..(16): 2'-deoxy-2'Fluoro
  misc_feature (17)..(19): 2'-O-methyl
  misc_feature (1)..(19): ribonucleotide unmodified or modified as described for this sequence
gucuacgagaccucccgggtt

SEQ ID NO: 1681 - DNA, 21 bp, Artificial Sequence
  Description of Artificial Sequence: Target Sequence/siNA antisense region (stab08)
  misc_feature (20)..(20): Phosphorothioate or Phosphorodithioate 3'-Internucleotide Linkage (optionally present)
  misc_feature (3)..(5): 2'-deoxy-2'Fluoro
  misc_feature (6)..(6): 2'-O-methyl
  misc_feature (7)..(7): 2'-deoxy-2'Fluoro
  misc_feature (8)..(11): 2'-O-methyl
  misc_feature (12)..(17): 2'-deoxy-2'Fluoro
  misc_feature (18)..(19): 2'-O-methyl
  misc_feature (1)..(19): ribonucleotide unmodified or modified as described for this sequence
ggucuacgagaccucccggtt

SEQ ID NO: 1682 - DNA, 21 bp, Artificial Sequence
  Description of Artificial Sequence: Target Sequence/siNA antisense region (stab08)
  misc_feature (20)..(20): Phosphorothioate or Phosphorodithioate 3'-Internucleotide Linkage (optionally present)
  misc_feature (1)..(1): 2'-deoxy-2'Fluoro
  misc_feature (2)..(3): 2'-O-methyl
  misc_feature (4)..(6): 2'-deoxy-2'Fluoro
  misc_feature (7)..(7): 2'-O-methyl
  misc_feature (8)..(8): 2'-deoxy-2'Fluoro
  misc_feature (9)..(12): 2'-O-methyl
  misc_feature (13)..(18): 2'-deoxy-2'Fluoro
  misc_feature (19)..(19): 2'-O-methyl
  misc_feature (1)..(19): ribonucleotide unmodified or modified as described for this sequence
cggucuacgagaccucccgtt

SEQ ID NO: 1683 - DNA, 21 bp, Artificial Sequence
  Description of Artificial Sequence: Target Sequence/siNA antisense region (stab08)
  misc_feature (20)..(20): Phosphorothioate or Phosphorodithioate 3'-Internucleotide Linkage (optionally present)
  misc_feature (2)..(2): 2'-deoxy-2'Fluoro
  misc_feature (3)..(4): 2'-O-methyl
  misc_feature (5)..(7): 2'-deoxy-2'Fluoro
  misc_feature (8)..(8): 2'-O-methyl
  misc_feature (9)..(9): 2'-deoxy-2'Fluoro
  misc_feature (10)..(13): 2'-O-methyl
  misc_feature (14)..(19): 2'-deoxy-2'Fluoro
  misc_feature (1)..(19): ribonucleotide unmodified or modified as described for this sequence
acggucuacgagaccuccctt

SEQ ID NO: 1684 - DNA, 21 bp, Artificial Sequence
  Description of Artificial Sequence: Target Sequence/siNA sense region (stab07)
  misc_feature (1)..(1): 5'-3 attached terminal deoxyabasic moiety, inverted abasic, inverted nucleotide or other terminal cap that is optionally present
  misc_feature (21)..(21): 3'-3 attached terminal deoxyabasic moiety, inverted abasic, inverted nucleotide or other terminal cap that is optionally present
  misc_feature (1)..(1): 2'-deoxy-2'Fluoro
  misc_feature (2)..(4): 2'-deoxy
  misc_feature (5)..(5): 2'-deoxy-2'Fluoro
  misc_feature (6)..(6): 2'-deoxy
  misc_feature (7)..(10): 2'-deoxy-2'Fluoro
  misc_feature (11)..(16): 2'-deoxy
  misc_feature (17)..(19): 2'-deoxy-2'Fluoro
  misc_feature (1)..(19): ribonucleotide unmodified or modified as described for this sequence
cagaugcucuggagggccctt

SEQ ID NO: 1685 - DNA, 21 bp, Artificial Sequence
  Description of Artificial Sequence: Target Sequence/siNA sense region (stab07)
  misc_feature (1)..(1): 5'-3 attached terminal deoxyabasic moiety, inverted abasic, inverted nucleotide or other terminal cap that is optionally present
  misc_feature (21)..(21): 3'-3 attached terminal deoxyabasic moiety, inverted abasic, inverted nucleotide or other terminal cap that is optionally present
  misc_feature (1)..(2): 2'-deoxy-2'Fluoro
  misc_feature (3)..(5): 2'-deoxy
  misc_feature (6)..(6): 2'-deoxy-2'Fluoro
  misc_feature (7)..(7): 2'-deoxy
  misc_feature (8)..(11): 2'-deoxy-2'Fluoro
  misc_feature (12)..(17): 2'-deoxy
  misc_feature (18)..(19): 2'-deoxy-2'Fluoro
  misc_feature (1)..(19): ribonucleotide unmodified or modified as described for this sequence
ccagaugcucuggagggcctt

SEQ ID NO: 1686 - DNA, 21 bp, Artificial Sequence
  Description of Artificial Sequence: Target Sequence/siNA sense region (stab07)
  misc_feature (1)..(1): 5'-3 attached terminal deoxyabasic moiety, inverted abasic, inverted nucleotide or other terminal cap that is optionally present
  misc_feature (21)..(21): 3'-3 attached terminal deoxyabasic moiety, inverted abasic, inverted nucleotide or other terminal cap that is optionally present
  misc_feature (1)..(1): 2'-deoxy
  misc_feature (2)..(3): 2'-deoxy-2'Fluoro
  misc_feature (4)..(6): 2'-deoxy
  misc_feature (7)..(7): 2'-deoxy-2'Fluoro
  misc_feature (8)..(8): 2'-deoxy
  misc_feature (9)..(12): 2'-deoxy-2'Fluoro
  misc_feature (13)..(18): 2'-deoxy
  misc_feature (19)..(19): 2'-deoxy-2'Fluoro
  misc_feature (1)..(19): ribonucleotide unmodified or modified as described for this sequence
gccagaugcucuggagggctt

SEQ ID NO: 1687 - DNA, 21 bp, Artificial Sequence
  Description of Artificial Sequence: Target Sequence/siNA sense region (stab07)
  misc_feature (1)..(1): 5'-3 attached terminal deoxyabasic moiety, inverted abasic, inverted nucleotide or other terminal cap that is optionally present
  misc_feature (21)..(21): 3'-3 attached terminal deoxyabasic moiety, inverted abasic, inverted nucleotide or other terminal cap that is optionally present
  misc_feature (1)..(1): 2'-deoxy-2'Fluoro
  misc_feature (2)..(2): 2'-deoxy
  misc_feature (3)..(4): 2'-deoxy-2'Fluoro
  misc_feature (5)..(7): 2'-deoxy
  misc_feature (8)..(8): 2'-deoxy-2'Fluoro
  misc_feature (9)..(9): 2'-deoxy
  misc_feature (10)..(13): 2'-deoxy-2'Fluoro
  misc_feature (14)..(19): 2'-deoxy
  misc_feature (1)..(19): ribonucleotide unmodified or modified as described for this sequence
ugccagaugcucuggagggtt

SEQ ID NO: 1688 - DNA, 21 bp, Artificial Sequence
  Description of Artificial Sequence: Target Sequence/siNA antisense region (stab08)
  misc_feature (20)..(20): Phosphorothioate or Phosphorodithioate 3'-Internucleotide Linkage (optionally present)
  misc_feature (4)..(9): 2'-deoxy-2'Fluoro
  misc_feature (10)..(13): 2'-O-methyl
  misc_feature (14)..(14): 2'-deoxy-2'Fluoro
  misc_feature (15)..(15): 2'-O-methyl
  misc_feature (16)..(18): 2'-deoxy-2'Fluoro
  misc_feature (19)..(19): 2'-O-methyl
  misc_feature (1)..(19): ribonucleotide unmodified or modified as described for this sequence
gggcccuccagagcaucugtt

SEQ ID NO: 1689 - DNA, 21 bp, Artificial Sequence
  Description of Artificial Sequence: Target Sequence/siNA antisense region (stab08)
  misc_feature (20)..(20): Phosphorothioate or Phosphorodithioate 3'-Internucleotide Linkage (optionally present)
  misc_feature (3)..(8): 2'-deoxy-2'Fluoro
  misc_feature (9)..(12): 2'-O-methyl
  misc_feature (13)..(13): 2'-deoxy-2'Fluoro
  misc_feature (14)..(14): 2'-O-methyl
  misc_feature (15)..(17): 2'-deoxy-2'Fluoro
  misc_feature (18)..(19): 2'-O-methyl
  misc_feature (1)..(19): ribonucleotide unmodified or modified as described for this sequence
ggcccuccagagcaucuggtt

SEQ ID NO: 1690 - DNA, 21 bp, Artificial Sequence
  Description of Artificial Sequence: Target Sequence/siNA antisense region (stab08)
  misc_feature (20)..(20): Phosphorothioate or Phosphorodithioate 3'-Internucleotide Linkage (optionally present)
  misc_feature (2)..(7): 2'-deoxy-2'Fluoro
  misc_feature (8)..(11): 2'-O-methyl
  misc_feature (12)..(12): 2'-deoxy-2'Fluoro
  misc_feature (13)..(13): 2'-O-methyl
  misc_feature (14)..(16): 2'-deoxy-2'Fluoro
  misc_feature (17)..(18): 2'-O-methyl
  misc_feature (19)..(19): 2'-deoxy-2'Fluoro
  misc_feature (1)..(19): ribonucleotide unmodified or modified as described for this sequence
gcccuccagagcaucuggctt

SEQ ID NO: 1691 - DNA, 21 bp, Artificial Sequence
  Description of Artificial Sequence: Target Sequence/siNA antisense region (stab08)
  misc_feature (20)..(20): Phosphorothioate or Phosphorodithioate 3'-Internucleotide Linkage (optionally present)
  misc_feature (1)..(6): 2'-deoxy-2'Fluoro
  misc_feature (7)..(10): 2'-O-methyl
  misc_feature (11)..(11): 2'-deoxy-2'Fluoro
  misc_feature (12)..(12): 2'-O-methyl
  misc_feature (13)..(15): 2'-deoxy-2'Fluoro
  misc_feature (16)..(17): 2'-O-methyl
  misc_feature (18)..(18): 2'-deoxy-2'Fluoro
  misc_feature (19)..(19): 2'-O-methyl
  misc_feature (1)..(19): ribonucleotide unmodified or modified as described for this sequence
cccuccagagcaucuggcatt

SEQ ID NO: 1692 - DNA, 21 bp, Artificial Sequence
  Description of Artificial Sequence: Target Sequence/siNA sense region (stab08)
  misc_feature (20)..(20): Phosphorothioate or Phosphorodithioate 3'-Internucleotide Linkage (optionally present)
  misc_feature (1)..(3): 2'-deoxy-2'Fluoro
  misc_feature (4)..(4): 2'-O-methyl
  misc_feature (5)..(5): 2'-deoxy-2'Fluoro
  misc_feature (6)..(7): 2'-O-methyl
  misc_feature (8)..(8): 2'-deoxy-2'Fluoro
  misc_feature (9)..(9): 2'-O-methyl
  misc_feature (10)..(11): 2'-deoxy-2'Fluoro
  misc_feature (12)..(12): 2'-O-methyl
  misc_feature (13)..(15): 2'-deoxy-2'Fluoro
  misc_feature (16)..(17): 2'-O-methyl
  misc_feature (18)..(18): 2'-deoxy-2'Fluoro
  misc_feature (19)..(19): 2'-O-methyl
  misc_feature (1)..(19): ribonucleotide unmodified or modified as described for this sequence
cuugugguacugccugauatt

SEQ ID NO: 1693 - DNA, 21 bp, Artificial Sequence
  Description of Artificial Sequence: Target Sequence/siNA sense region (stab08)
  misc_feature (20)..(20): Phosphorothioate or Phosphorodithioate 3'-Internucleotide Linkage (optionally present)
  misc_feature (1)..(1): 2'-deoxy-2'Fluoro
  misc_feature (2)..(3): 2'-O-methyl
  misc_feature (4)..(4): 2'-deoxy-2'Fluoro
  misc_feature (5)..(5): 2'-O-methyl
  misc_feature (6)..(7): 2'-deoxy-2'Fluoro
  misc_feature (8)..(8): 2'-O-methyl
  misc_feature (9)..(11): 2'-deoxy-2'Fluoro
  misc_feature (12)..(13): 2'-O-methyl
  misc_feature (14)..(14): 2'-deoxy-2'Fluoro
  misc_feature (15)..(18): 2'-O-methyl
  misc_feature (19)..(19): 2'-deoxy-2'Fluoro
  misc_feature (1)..(19): ribonucleotide unmodified or modified as described for this sequence
ugguacugccugauagggutt

SEQ ID NO: 1694 - DNA, 21 bp, Artificial Sequence
  Description of Artificial Sequence: Target Sequence/siNA sense region (stab08)
  misc_feature (20)..(20): Phosphorothioate or Phosphorodithioate 3'-Internucleotide Linkage (optionally present)
  misc_feature (1)..(4): 2'-deoxy-2'Fluoro
  misc_feature (5)..(10): 2'-O-methyl
  misc_feature (11)..(14): 2'-deoxy-2'Fluoro
  misc_feature (15)..(15): 2'-O-methyl
  misc_feature (16)..(16): 2'-deoxy-2'Fluoro
  misc_feature (17)..(19): 2'-O-methyl
  misc_feature (1)..(19): ribonucleotide unmodified or modified as described for this sequence
ccccgggaggucucguagatt

SEQ ID NO: 1695 - DNA, 21 bp, Artificial Sequence
  Description of Artificial Sequence: Target Sequence/siNA sense region (stab08)
  misc_feature (20)..(20): Phosphorothioate or Phosphorodithioate 3'-Internucleotide Linkage (optionally present)
  misc_feature (2)..(2): 2'-deoxy-2'Fluoro
  misc_feature (3)..(4): 2'-O-methyl
  misc_feature (5)..(7): 2'-deoxy-2'Fluoro
  misc_feature (8)..(8): 2'-O-methyl
  misc_feature (9)..(10): 2'-deoxy-2'Fluoro
  misc_feature (11)..(11): 2'-O-methyl
  misc_feature (12)..(12): 2'-deoxy-2'Fluoro
  misc_feature (13)..(14): 2'-O-methyl
  misc_feature (15)..(15): 2'-deoxy-2'Fluoro
  misc_feature (16)..(16): 2'-O-methyl
  misc_feature (17)..(19): 2'-deoxy-2'Fluoro
  misc_feature (1)..(19): ribonucleotide unmodified or modified as described for this sequence
auaguccgucaugguguuctt

SEQ ID NO: 1696 - DNA, 21 bp, Artificial Sequence
  Description of Artificial Sequence: Target Sequence/siNA sense region (stab08)
  misc_feature (20)..(20): Phosphorothioate or Phosphorodithioate 3'-Internucleotide Linkage (optionally present)
  misc_feature (1)..(1): 2'-deoxy-2'Fluoro
  misc_feature (2)..(5): 2'-O-methyl
  misc_feature (6)..(6): 2'-deoxy-2'Fluoro
  misc_feature (7)..(8): 2'-O-methyl
  misc_feature (9)..(11): 2'-deoxy-2'Fluoro
  misc_feature (12)..(12): 2'-O-methyl
  misc_feature (13)..(14): 2'-deoxy-2'Fluoro
  misc_feature (15)..(15): 2'-O-methyl
  misc_feature (16)..(16): 2'-deoxy-2'Fluoro
  misc_feature (17)..(18): 2'-O-methyl
  misc_feature (19)..(19): 2'-deoxy-2'Fluoro
  misc_feature (1)..(19): ribonucleotide unmodified or modified as described for this sequence
ugggauaguccgucauggutt

SEQ ID NO: 1697 - DNA, 21 bp, Artificial Sequence
  Description of Artificial Sequence: Target Sequence/siNA sense region (stab08)
  misc_feature (20)..(20): Phosphorothioate or Phosphorodithioate 3'-Internucleotide Linkage (optionally present)
  misc_feature (4)..(4): 2'-deoxy-2'Fluoro
  misc_feature (5)..(5): 2'-O-methyl
  misc_feature (6)..(9): 2'-deoxy-2'Fluoro
  misc_feature (10)..(15): 2'-O-methyl
  misc_feature (16)..(19): 2'-deoxy-2'Fluoro
  misc_feature (1)..(19): ribonucleotide unmodified or modified as described for this sequence
agaugcucuggagggcccctt

SEQ ID NO: 1698 - DNA, 21 bp, Artificial Sequence
  Description of Artificial Sequence: Target Sequence/siNA sense region (stab08)
  misc_feature (20)..(20): Phosphorothioate or Phosphorodithioate 3'-Internucleotide Linkage (optionally present)
  misc_feature (1)..(2): 2'-deoxy-2'Fluoro
  misc_feature (3)..(8): 2'-O-methyl
  misc_feature (9)..(12): 2'-deoxy-2'Fluoro
  misc_feature (13)..(13): 2'-O-methyl
  misc_feature (14)..(14): 2'-deoxy-2'Fluoro
  misc_feature (15)..(17): 2'-O-methyl
  misc_feature (18)..(19): 2'-deoxy-2'Fluoro
  misc_feature (1)..(19): ribonucleotide unmodified or modified as described for this sequence
ccgggaggucucguagacctt

SEQ ID NO: 1699 - DNA, 21 bp, Artificial Sequence
  Description of Artificial Sequence: Target Sequence/siNA sense region (stab08)
  misc_feature (20)..(20): Phosphorothioate or Phosphorodithioate 3'-Internucleotide Linkage (optionally present)
  misc_feature (1)..(2): 2'-deoxy-2'Fluoro
  misc_feature (3)..(5): 2'-O-methyl
  misc_feature (6)..(6): 2'-deoxy-2'Fluoro
  misc_feature (7)..(7): 2'-O-methyl
  misc_feature (8)..(11): 2'-deoxy-2'Fluoro
  misc_feature (12)..(17): 2'-O-methyl
  misc_feature (18)..(19): 2'-deoxy-2'Fluoro
  misc_feature (1)..(19): ribonucleotide unmodified or modified as described for this sequence
ccagaugcucuggagggcctt

SEQ ID NO: 1700 - DNA, 21 bp, Artificial Sequence
  Description of Artificial Sequence: Target Sequence/siNA sense region (stab08)
  misc_feature (20)..(20): Phosphorothioate or Phosphorodithioate 3'-Internucleotide Linkage (optionally present)
  misc_feature (1)..(1): 2'-deoxy-2'Fluoro
  misc_feature (2)..(7): 2'-O-methyl
  misc_feature (8)..(11): 2'-deoxy-2'Fluoro
  misc_feature (12)..(12): 2'-O-methyl
  misc_feature (13)..(13): 2'-deoxy-2'Fluoro
  misc_feature (14)..(16): 2'-O-methyl
  misc_feature (17)..(18): 2'-deoxy-2'Fluoro
  misc_feature (19)..(19): 2'-O-methyl
  misc_feature (1)..(19): ribonucleotide unmodified or modified as described for this sequence
cgggaggucucguagaccgtt

SEQ ID NO: 1701 - DNA, 21 bp, Artificial Sequence
  Description of Artificial Sequence: Target Sequence/siNA sense region (stab08)
  misc_feature (20)..(20): Phosphorothioate or Phosphorodithioate 3'-Internucleotide Linkage (optionally present)
  misc_feature (2)..(3): 2'-deoxy-2'Fluoro
  misc_feature (4)..(6): 2'-O-methyl
  misc_feature (7)..(7): 2'-deoxy-2'Fluoro
  misc_feature (8)..(8): 2'-O-methyl
  misc_feature (9)..(12): 2'-deoxy-2'Fluoro
  misc_feature (13)..(18): 2'-O-methyl
  misc_feature (19)..(19): 2'-deoxy-2'Fluoro
  misc_feature (1)..(19): ribonucleotide unmodified or modified as described for this sequence
gccagaugcucuggagggctt

SEQ ID NO: 1702 - DNA, 21 bp, Artificial Sequence
  Description of Artificial Sequence: Target Sequence/siNA sense region (stab08)
  misc_feature (1)..(1): 5'-3 attached terminal deoxyabasic moiety, inverted abasic, inverted nucleotide or other terminal cap that is optionally present
  misc_feature (20)..(20): Phosphorothioate or Phosphorodithioate 3'-Internucleotide Linkage (optionally present)
  misc_feature (1)..(2): 2'-deoxy-2'Fluoro
  misc_feature (3)..(8): 2'-O-methyl
  misc_feature (9)..(12): 2'-deoxy-2'Fluoro
  misc_feature (13)..(13): 2'-O-methyl
  misc_feature (14)..(14): 2'-deoxy-2'Fluoro
  misc_feature (15)..(17): 2'-O-methyl
  misc_feature (18)..(19): 2'-deoxy-2'Fluoro
  misc_feature (1)..(19): ribonucleotide unmodified or modified as described for this sequence
ccgggaggucucguagacctt

SEQ ID NO: 1703 - DNA, 21 bp, Artificial Sequence
  Description of Artificial Sequence: Target Sequence/siNA sense region (stab08)
  misc_feature (21)..(21): 3'-3 attached terminal deoxyabasic moiety, inverted abasic, inverted nucleotide or other terminal cap that is optionally present
  misc_feature (20)..(20): Phosphorothioate or Phosphorodithioate 3'-Internucleotide Linkage (optionally present)
  misc_feature (1)..(2): 2'-deoxy-2'Fluoro
  misc_feature (3)..(8): 2'-O-methyl
  misc_feature (9)..(12): 2'-deoxy-2'Fluoro
  misc_feature (13)..(13): 2'-O-methyl
  misc_feature (14)..(14): 2'-deoxy-2'Fluoro
  misc_feature (15)..(17): 2'-O-methyl
  misc_feature (18)..(19): 2'-deoxy-2'Fluoro
  misc_feature (1)..(19): ribonucleotide unmodified or modified as described for this sequence
ccgggaggucucguagacctt

SEQ ID NO: 1704 - DNA, 21 bp, Artificial Sequence
  Description of Artificial Sequence: Target Sequence/siNA sense region (stab08)
  misc_feature (1)..(1): 5'-3 attached terminal deoxyabasic moiety, inverted abasic, inverted nucleotide or other terminal cap that is optionally present
  misc_feature (21)..(21): 3'-3 attached terminal deoxyabasic moiety, inverted abasic, inverted nucleotide or other terminal cap that is optionally present
  misc_feature (20)..(20): Phosphorothioate or Phosphorodithioate 3'-Internucleotide Linkage (optionally present)
  misc_feature (1)..(2): 2'-deoxy-2'Fluoro
  misc_feature (3)..(8): 2'-O-methyl
  misc_feature (9)..(12): 2'-deoxy-2'Fluoro
  misc_feature (13)..(13): 2'-O-methyl
  misc_feature (14)..(14): 2'-deoxy-2'Fluoro
  misc_feature (15)..(17): 2'-O-methyl
  misc_feature (18)..(19): 2'-deoxy-2'Fluoro
  misc_feature (1)..(19): ribonucleotide unmodified or modified as described for this sequence
ccgggaggucucguagacctt

SEQ ID NO: 1705 - DNA, 34 bp, Artificial Sequence
  Description of Artificial Sequence: Target Sequence/siNA STRAND region
  misc_feature (1)..(32): ribonucleotide unmodified or modified as described for this sequence
ucucguagaccuuggucuacgagaccucccggtt

SEQ ID NO: 1706 - DNA, 32 bp, Artificial Sequence
  Description of Artificial Sequence: Target Sequence/siNA STRAND region
  misc_feature (1)..(30): ribonucleotide unmodified or modified as described for this sequence
ucguagaccuuggucuacgagaccucccggtt

SEQ ID NO: 1707 - DNA, 30 bp, Artificial Sequence
  Description of Artificial Sequence: Target Sequence/siNA STRAND region
  misc_feature (1)..(28): ribonucleotide unmodified or modified as described for this sequence
guagaccuuggucuacgagaccucccggtt

SEQ ID NO: 1708 - DNA, 28 bp, Artificial Sequence
  Description of Artificial Sequence: Target Sequence/siNA STRAND region
  misc_feature (1)..(26): ribonucleotide unmodified or modified as described for this sequence
agaccuuggucuacgagaccucccggtt

SEQ ID NO: 1709 - RNA, 32 nt, Artificial Sequence
  Description of Artificial Sequence: Target Sequence/siNA STRAND region
ggucuacgagaccucccgguuccgggaggucu

SEQ ID NO: 1710 - RNA, 30 nt, Artificial Sequence
  Description of Artificial Sequence: Target Sequence/siNA STRAND region
ggucuacgagaccucccgguuccgggaggu

SEQ ID NO: 1711 - RNA, 28 nt, Artificial Sequence
  Description of Artificial Sequence: Target Sequence/siNA STRAND region
ggucuacgagaccucccgguuccgggag

SEQ ID NO: 1712 - RNA, 26 nt, Artificial Sequence
  Description of Artificial Sequence: Target Sequence/siNA STRAND region
ggucuacgagaccucccgguuccggg

SEQ ID NO: 1713 - DNA, 35 bp, Artificial Sequence
  Description of Artificial Sequence: Target Sequence/siNA STRAND region
  misc_feature (1)..(33): ribonucleotide unmodified or modified as described for this sequence
cucguagaccgaaaggucuacgagaccucccggtt

SEQ ID NO: 1714 - DNA, 33 bp, Artificial Sequence
  Description of Artificial Sequence: Target Sequence/siNA STRAND region
  misc_feature (1)..(31): ribonucleotide unmodified or modified as described for this sequence
cguagaccgaaaggucuacgagaccucccggtt

SEQ ID NO: 1715 - DNA, 31 bp, Artificial Sequence
  Description of Artificial Sequence: Target Sequence/siNA STRAND region
  misc_feature (1)..(29): ribonucleotide unmodified or modified as described for this sequence
uagaccgaaaggucuacgagaccucccggtt

SEQ ID NO: 1716 - DNA, 29 bp, Artificial Sequence
  Description of Artificial Sequence: Target Sequence/siNA STRAND region
  misc_feature (1)..(27): ribonucleotide unmodified or modified as described for this sequence
gaccgaaaggucuacgagaccucccggtt

SEQ ID NO: 1717 - RNA, 35 nt, Artificial Sequence
  Description of Artificial Sequence: Target Sequence/siNA STRAND region
ggucuacgagaccucccgguugaaaccgggagguc

SEQ ID NO: 1718 - RNA, 33 nt, Artificial Sequence
  Description of Artificial Sequence: Target Sequence/siNA STRAND region
ggucuacgagaccucccgguugaaaccgggagg

SEQ ID NO: 1719 - RNA, 31 nt, Artificial Sequence
  Description of Artificial Sequence: Target Sequence/siNA STRAND region
ggucuacgagaccucccgguugaaaccggga

SEQ ID NO: 1720 - RNA, 29 nt, Artificial Sequence
  Description of Artificial Sequence: Target Sequence/siNA STRAND region
ggucuacgagaccucccgguugaaaccgg

SEQ ID NO: 1721 - DNA, 40 bp, Artificial Sequence
  Description of Artificial Sequence: Target Sequence/siNA STRAND region
  misc_feature (1)..(40): ribonucleotide unmodified or modified as described for this sequence
cguagaccuuuuuguguagggucuacgagaccucccggtt

SEQ ID NO: 1722 - DNA, 38 bp, Artificial Sequence
  Description of Artificial Sequence: Target Sequence/siNA STRAND region
  misc_feature (1)..(36): ribonucleotide unmodified or modified as described for this sequence
uagaccuuuuuguguagggucuacgagaccucccggtt

SEQ ID NO: 1723 - DNA, 36 bp, Artificial Sequence
  Description of Artificial Sequence: Target Sequence/siNA STRAND region
  misc_feature (1)..(34): ribonucleotide unmodified or modified as described for this sequence
gaccuuuuuguguagggucuacgagaccucccggtt

SEQ ID NO: 1724 - DNA, 34 bp, Artificial Sequence
  Description of Artificial Sequence: Target Sequence/siNA STRAND region
  misc_feature (1)..(32): ribonucleotide unmodified or modified as described for this sequence
ccuuuuuguguagggucuacgagaccucccggtt

SEQ ID NO: 1725 - RNA, 40 nt, Artificial Sequence
  Description of Artificial Sequence: Target Sequence/siNA STRAND region
ggucuacgagaccucccgguuuuuguguagccgggagguc

SEQ ID NO: 1726 - RNA, 38 nt, Artificial Sequence
  Description of Artificial Sequence: Target Sequence/siNA STRAND region
ggucuacgagaccucccgguuuuuguguagccgggagg

SEQ ID NO: 1727 - RNA, 36 nt, Artificial Sequence
  Description of Artificial Sequence: Target Sequence/siNA STRAND region
ggucuacgagaccucccgguuuuuguguagccggga

SEQ ID NO: 1728 - RNA, 34 nt, Artificial Sequence
  Description of Artificial Sequence: Target Sequence/siNA STRAND region
ggucuacgagaccucccgguuuuuguguagccgg

SEQ ID NO: 1729 - DNA, 21 bp, Artificial Sequence
  Description of Artificial Sequence: Target Sequence/siNA antisense region (stab05)
  misc_feature (20)..(20): Phosphorothioate or Phosphorodithioate 3'-Internucleotide Linkage (optionally present)
  misc_feature (3)..(5): 2'-deoxy-2'Fluoro
  misc_feature (7)..(7): 2'-deoxy-2'Fluoro
  misc_feature (12)..(17): 2'-deoxy-2'Fluoro
  misc_feature (1)..(19): ribonucleotide unmodified or modified as described for this sequence
ggucuacgagaccucccggtt

SEQ ID NO: 1730 - DNA, 21 bp, Artificial Sequence
  Description of Artificial Sequence: Target Sequence/siNA antisense region (stab05)
  misc_feature (20)..(20): Phosphorothioate or Phosphorodithioate 3'-Internucleotide Linkage (optionally present)
  misc_feature (1)..(1): Terminal 5' phosphate
  misc_feature (3)..(5): 2'-deoxy-2'Fluoro
  misc_feature (7)..(7): 2'-deoxy-2'Fluoro
  misc_feature (12)..(17): 2'-deoxy-2'Fluoro
  misc_feature (1)..(19): ribonucleotide unmodified or modified as described for this sequence
ggucuacgagaccucccggtt

SEQ ID NO: 1731 - DNA, 21 bp, Artificial Sequence
  Description of Artificial Sequence: Target Sequence/siNA antisense region (stab05)
  misc_feature (20)..(20): Phosphorothioate or Phosphorodithioate 3'-Internucleotide Linkage (optionally present)
  misc_feature (20)..(20): Phosphorothioate or Phosphorodithioate 3'-Internucleotide Linkage (optionally present)
  misc_feature (3)..(5): 2'-deoxy-2'Fluoro
  misc_feature (7)..(7): 2'-deoxy-2'Fluoro
  misc_feature (12)..(17): 2'-deoxy-2'Fluoro
  misc_feature (1)..(19): ribonucleotide unmodified or modified as described for this sequence
ggucuacgagaccucccggtt

SEQ ID NO: 1732 - DNA, 21 bp, Artificial Sequence
  Description of Artificial Sequence: Target Sequence/siNA antisense region (stab00)
  misc_feature (1)..(19): ribonucleotide unmodified or modified as described for this sequence
ggucuacgagaccucccggtt

SEQ ID NO: 1733 - DNA, 21 bp, Artificial Sequence
  Description of Artificial Sequence: Target Sequence/siNA antisense region
  misc_feature (1)..(1): Terminal 5' phosphate
  misc_feature (1)..(19): ribonucleotide unmodified or modified as described for this sequence
ggucuacgagaccucccggtt

SEQ ID NO: 1734 - DNA, 21 bp, Artificial Sequence
  Description of Artificial Sequence: Target Sequence/siNA antisense region
  misc_feature (1)..(1): Phosphorothioate or Phosphorodithioate 3'-Internucleotide Linkage (optionally present)
  misc_feature (1)..(19): ribonucleotide unmodified or modified as described for this sequence
ggucuacgagaccucccggtt

SEQ ID NO: 1735 - DNA, 23 bp, Artificial Sequence
  Description of Artificial Sequence: Target Sequence/siNA antisense region
  misc_feature (1)..(1): Terminal 5' phosphate
  misc_feature (1)..(21): ribonucleotide unmodified or modified as described for this sequence
ggucuacgagaccucccggggtt

SEQ ID NO: 1736 - RNA, 27 nt, Artificial Sequence
  Description of Artificial Sequence: Target Sequence/siNA antisense region
  misc_feature (27)..(27): 3'-3 attached terminal deoxyabasic moiety, inverted abasic, inverted nucleotide or other terminal cap that is optionally present
  misc_feature (1)..(1): Terminal 5' phosphate
ggucuacgagaccucccggucucguau

SEQ ID NO: 1737 - RNA, 31 nt, Artificial Sequence
  Description of Artificial Sequence: Target Sequence/siNA antisense region
  misc_feature (31)..(31): 3'-3 attached terminal deoxyabasic moiety, inverted abasic, inverted nucleotide or other terminal cap that is optionally present
  misc_feature (1)..(1): Terminal 5' phosphate
ggucuacgagaccucccggaggucucguauu

SEQ ID NO: 1738 - DNA, 29 bp, Artificial Sequence
  Description of Artificial Sequence: Target Sequence/siNA antisense region
  misc_feature (29)..(29): 3'-3 attached terminal deoxyabasic moiety, inverted abasic, inverted nucleotide or other terminal cap that is optionally present
  misc_feature (1)..(1): Terminal 5' phosphate
  misc_feature (1)..(19): ribonucleotide unmodified or modified as described for this sequence
  misc_feature (22)..(29): ribonucleotide unmodified or modified as described for this sequence
ggucuacgagaccucccggttucucguau

SEQ ID NO: 1739 - DNA, 32 bp, Artificial Sequence
  Description of Artificial Sequence: Target Sequence/siNA antisense region
  misc_feature (32)..(32): 3'-3 attached terminal deoxyabasic moiety, inverted abasic, inverted nucleotide or other terminal cap that is optionally present
  misc_feature (1)..(1): Terminal 5' phosphate
  misc_feature (1)..(19): ribonucleotide unmodified or modified as described for this sequence
  misc_feature (22)..(32): ribonucleotide unmodified or modified as described for this sequence
ggucuacgagaccucccggttaggucucguau

SEQ ID NO: 1740 - DNA, 21 bp, Artificial Sequence
  Description of Artificial Sequence: Target Sequence/siNA sense region (stab04)
  misc_feature (1)..(1): 5'-3 attached terminal deoxyabasic moiety, inverted abasic, inverted nucleotide or other terminal cap that is optionally present
  misc_feature (21)..(21): 3'-3 attached terminal deoxyabasic moiety, inverted abasic, inverted nucleotide or other terminal cap that is optionally present
  misc_feature (1)..(2): 2'-deoxy-2'Fluoro
  misc_feature (9)..(12): 2'-deoxy-2'Fluoro
  misc_feature (14)..(14): 2'-deoxy-2'Fluoro
  misc_feature (18)..(19): 2'-deoxy-2'Fluoro
  misc_feature (1)..(19): ribonucleotide unmodified or modified as described for this sequence
ccgggaggucucguagacctt

SEQ ID NO: 1741 - DNA, 21 bp, Artificial Sequence
  Description of Artificial Sequence: Target Sequence/siNA sense region (stab09)
  misc_feature (1)..(1): 5'-3 attached terminal deoxyabasic moiety, inverted abasic, inverted nucleotide or other terminal cap that is optionally present
  misc_feature (21)..(21): 3'-3 attached terminal deoxyabasic moiety, inverted abasic, inverted nucleotide or other terminal cap that is optionally present
  misc_feature (1)..(19): ribonucleotide unmodified or modified as described for this sequence
ccccgggaggucucguagatt

SEQ ID NO: 1742 - DNA, 21 bp, Artificial Sequence
  Description of Artificial Sequence: Target Sequence/siNA sense region (stab09)
  misc_feature (1)..(1): 5'-3 attached terminal deoxyabasic moiety, inverted abasic, inverted nucleotide or other terminal cap that is optionally present
  misc_feature (21)..(21): 3'-3 attached terminal deoxyabasic moiety, inverted abasic, inverted nucleotide or other terminal cap that is optionally present
  misc_feature (1)..(19): ribonucleotide unmodified or modified as described for this sequence
cccgggaggucucguagactt

SEQ ID NO: 1743 - DNA, 21 bp, Artificial Sequence
  Description of Artificial Sequence: Target Sequence/siNA sense region (stab09)
  misc_feature (1)..(1): 5'-3 attached terminal deoxyabasic moiety, inverted abasic, inverted nucleotide or other terminal cap that is optionally present
  misc_feature (21)..(21): 3'-3 attached terminal deoxyabasic moiety, inverted abasic, inverted nucleotide or other terminal cap that is optionally present
  misc_feature (1)..(19): ribonucleotide unmodified or modified as described for this sequence
ccgggaggucucguagacctt

SEQ ID NO: 1744 - DNA, 21 bp, Artificial Sequence
  Description of Artificial Sequence: Target Sequence/siNA sense region (stab09)
  misc_feature (1)..(1): 5'-3 attached terminal deoxyabasic moiety, inverted abasic, inverted nucleotide or other terminal cap that is optionally present
  misc_feature (21)..(21): 3'-3 attached terminal deoxyabasic moiety, inverted abasic, inverted nucleotide or other terminal cap that is optionally present
  misc_feature (1)..(19): ribonucleotide unmodified or modified as described for this sequence
cgggaggucucguagaccgtt

SEQ ID NO: 1745 - DNA, 21 bp, Artificial Sequence
  Description of Artificial Sequence: Target Sequence/siNA sense region (stab09)
  misc_feature (1)..(1): 5'-3 attached terminal deoxyabasic moiety, inverted abasic, inverted nucleotide or other terminal cap that is optionally present
  misc_feature (21)..(21): 3'-3 attached terminal deoxyabasic moiety, inverted abasic, inverted nucleotide or other terminal cap that is optionally present
  misc_feature (1)..(19): ribonucleotide unmodified or modified as described for this sequence
gggaggucucguagaccgutt

SEQ ID NO: 1746 - DNA, 21 bp, Artificial Sequence
  Description of Artificial Sequence: Target Sequence/siNA antisense region (stab10)
  misc_feature (20)..(20): Phosphorothioate or Phosphorodithioate 3'-Internucleotide Linkage (optionally present)
  misc_feature (1)..(19): ribonucleotide unmodified or modified as described for this sequence
ucuacgagaccucccggggtt

SEQ ID NO: 1747 - DNA, 21 bp, Artificial Sequence
  Description of Artificial Sequence: Target Sequence/siNA antisense region (stab10)
  misc_feature (20)..(20): Phosphorothioate or Phosphorodithioate 3'-Internucleotide Linkage (optionally present)
  misc_feature (1)..(19): ribonucleotide unmodified or modified as described for this sequence
gucuacgagaccucccgggtt

SEQ ID NO: 1748 - DNA, 21 bp, Artificial Sequence
  Description of Artificial Sequence: Target Sequence/siNA antisense region (stab10)
  misc_feature (20)..(20): Phosphorothioate or Phosphorodithioate 3'-Internucleotide Linkage (optionally present)
  misc_feature (1)..(19): ribonucleotide unmodified or modified as described for this sequence
ggucuacgagaccucccggtt

SEQ ID NO: 1749 - DNA, 21 bp, Artificial Sequence
  Description of Artificial Sequence: Target Sequence/siNA antisense region (stab10)
  misc_feature (20)..(20): Phosphorothioate or Phosphorodithioate 3'-Internucleotide Linkage (optionally present)
  misc_feature (1)..(19): ribonucleotide unmodified or modified as described for this sequence
cggucuacgagaccucccgtt

SEQ ID NO: 1750 - DNA, 21 bp, Artificial Sequence
  Description of Artificial Sequence: Target Sequence/siNA antisense region (stab10)
  misc_feature (20)..(20): Phosphorothioate or Phosphorodithioate 3'-Internucleotide Linkage (optionally present)
  misc_feature (1)..(19): ribonucleotide unmodified or modified as described for this sequence
acggucuacgagaccuccctt

SEQ ID NO: 1751 - DNA, 21 bp, Artificial Sequence
  Description of Artificial Sequence: Target Sequence/siNA sense region (stab04)
  misc_feature (1)..(1): 5'-3 attached terminal deoxyabasic moiety, inverted abasic, inverted nucleotide or other terminal cap that is optionally present
  misc_feature (21)..(21): 3'-3 attached terminal deoxyabasic moiety, inverted abasic, inverted nucleotide or other terminal cap that is optionally present
  misc_feature (1)..(2): 2'-deoxy-2'Fluoro
  misc_feature (6)..(6): 2'-deoxy-2'Fluoro
  misc_feature (8)..(11): 2'-deoxy-2'Fluoro
  misc_feature (18)..(19): 2'-deoxy-2'Fluoro
  misc_feature (1)..(19): ribonucleotide unmodified or modified as described for this sequence
ccagaugcucuggagggcctt

SEQ ID NO: 1752 - DNA, 21 bp, Artificial Sequence
  Description of Artificial Sequence: Target Sequence/siNA antisense region (stab05)
  misc_feature (20)..(20): Phosphorothioate or Phosphorodithioate 3'-Internucleotide Linkage (optionally present)
  misc_feature (3)..(8): 2'-deoxy-2'Fluoro
  misc_feature (13)..(13): 2'-deoxy-2'Fluoro
  misc_feature (15)..(17): 2'-deoxy-2'Fluoro
  misc_feature (1)..(19): ribonucleotide unmodified or modified as described for this sequence
ggcccuccagagcaucuggtt

SEQ ID NO: 1753 - DNA, 21 bp, Artificial Sequence
  Description of Artificial Sequence: Target Sequence/siNA sense region (stab09)
  misc_feature (1)..(1): 5'-3 attached terminal deoxyabasic moiety, inverted abasic, inverted nucleotide or other terminal cap that is optionally present
  misc_feature (21)..(21): 3'-3 attached terminal deoxyabasic moiety, inverted abasic, inverted nucleotide or other terminal cap that is optionally present
  misc_feature (1)..(19): ribonucleotide unmodified or modified as described for this sequence
agaugcucuggagggcccctt

SEQ ID NO: 1754 - DNA, 21 bp, Artificial Sequence
  Description of Artificial Sequence: Target Sequence/siNA sense region (stab09)
  misc_feature (1)..(1): 5'-3 attached terminal deoxyabasic moiety, inverted abasic, inverted nucleotide or other terminal cap that is optionally present
  misc_feature (21)..(21): 3'-3 attached terminal deoxyabasic moiety, inverted abasic, inverted nucleotide or other terminal cap that is optionally present
  misc_feature (1)..(19): ribonucleotide unmodified or modified as described for this sequence
cagaugcucuggagggccctt

SEQ ID NO: 1755 - DNA, 21 bp, Artificial Sequence
  Description of Artificial Sequence: Target Sequence/siNA sense region (stab09)
  misc_feature (1)..(1): 5'-3 attached terminal deoxyabasic moiety, inverted abasic, inverted nucleotide or other terminal cap that is optionally present
  misc_feature (21)..(21): 3'-3 attached terminal deoxyabasic moiety, inverted abasic, inverted nucleotide or other terminal cap that is optionally present
  misc_feature (1)..(19): ribonucleotide unmodified or modified as described for this sequence
ccagaugcucuggagggcctt

SEQ ID NO: 1756 - DNA, 21 bp, Artificial Sequence
  Description of Artificial Sequence: Target Sequence/siNA sense region (stab09)
  misc_feature (1)..(1): 5'-3 attached terminal deoxyabasic moiety, inverted abasic, inverted nucleotide or other terminal cap that is optionally present
  misc_feature (21)..(21): 3'-3 attached terminal deoxyabasic moiety, inverted abasic, inverted nucleotide or other terminal cap that is optionally present
  misc_feature (1)..(19): ribonucleotide unmodified or modified as described for this sequence
gccagaugcucuggagggctt

SEQ ID NO: 1757 - DNA, 21 bp, Artificial Sequence
  Description of Artificial Sequence: Target Sequence/siNA sense region (stab09)
  misc_feature (1)..(1): 5'-3 attached terminal deoxyabasic moiety, inverted abasic, inverted nucleotide or other terminal cap that is optionally present
  misc_feature (21)..(21): 3'-3 attached terminal deoxyabasic moiety, inverted abasic, inverted nucleotide or other terminal cap that is optionally present
  misc_feature (1)..(19): ribonucleotide unmodified or modified as described for this sequence
ugccagaugcucuggagggtt

SEQ ID NO: 1758 - DNA, 21 bp, Artificial Sequence
  Description of Artificial Sequence: Target Sequence/siNA antisense region (stab10)
  misc_feature (20)..(20): Phosphorothioate or Phosphorodithioate 3'-Internucleotide Linkage (optionally present)
  misc_feature (1)..(19): ribonucleotide unmodified or modified as described for this sequence
ggggcccuccagagcaucutt

SEQ ID NO: 1759 - DNA, 21 bp, Artificial Sequence
  Description of Artificial Sequence: Target Sequence/siNA antisense region (stab10)
  misc_feature (20)..(20): Phosphorothioate or Phosphorodithioate 3'-Internucleotide Linkage (optionally present)
  misc_feature (1)..(19): ribonucleotide unmodified or modified as described for this sequence
gggcccuccagagcaucugtt

SEQ ID NO: 1760 - DNA, 21 bp, Artificial Sequence
  Description of Artificial Sequence: Target Sequence/siNA antisense region (stab10)
  misc_feature (20)..(20): Phosphorothioate or Phosphorodithioate 3'-Internucleotide Linkage (optionally present)
  misc_feature (1)..(19): ribonucleotide unmodified or modified as described for this sequence
ggcccuccagagcaucuggtt

SEQ ID NO: 1761 - DNA, 21 bp, Artificial Sequence
  Description of Artificial Sequence: Target Sequence/siNA antisense region (stab10)
  misc_feature (20)..(20): Phosphorothioate or Phosphorodithioate 3'-Internucleotide Linkage (optionally present)
  misc_feature (1)..(19): ribonucleotide unmodified or modified as described for this sequence
gcccuccagagcaucuggctt

SEQ ID NO: 1762 - DNA, 21 bp, Artificial Sequence
  Description of Artificial Sequence: Target Sequence/siNA antisense region (stab10)
  misc_feature (20)..(20): Phosphorothioate or Phosphorodithioate 3'-Internucleotide Linkage (optionally present)
  misc_feature (1)..(19): ribonucleotide unmodified or modified as described for this sequence
cccuccagagcaucuggcatt

SEQ ID NO: 1763 - RNA, 31 nt, Artificial Sequence
  Description of Artificial Sequence: Target Sequence/siNA antisense region
  misc_feature (31)..(31): 3'-3 attached terminal deoxyabasic moiety, inverted abasic, inverted nucleotide or other terminal cap that is optionally present
  misc_feature (1)..(1): Terminal 5' phosphate
acccuaucaggcaguaccaguacugccugau

SEQ ID NO: 1764 - RNA, 31 nt, Artificial Sequence
  Description of Artificial Sequence: Target Sequence/siNA antisense region
  misc_feature (31)..(31): 3'-3 attached terminal deoxyabasic moiety, inverted abasic, inverted nucleotide or other terminal cap that is optionally present
  misc_feature (1)..(1): Terminal 5' phosphate
acccuaucaggcaguaccgguacugccugau

SEQ ID NO: 1765 - RNA, 31 nt, Artificial Sequence
  Description of Artificial Sequence: Target Sequence/siNA STRAND region
  misc_feature (31)..(31): 3'-3 attached terminal deoxyabasic moiety, inverted abasic, inverted nucleotide or other terminal cap that is optionally present
  misc_feature (1)..(1): Terminal 5' phosphate
ggucuacgagaccucccggaggucucguaga

SEQ ID NO: 1766 - RNA, 28 nt, Artificial Sequence
  Description of Artificial Sequence: Target Sequence/siNA STRAND region
  misc_feature (28)..(28): 3'-3 attached terminal deoxyabasic moiety, inverted abasic, inverted nucleotide or other terminal cap that is optionally present
  misc_feature (1)..(1): Terminal 5' phosphate
ggucuacgagaccuccggaggucucgua

SEQ ID NO: 1767 - DNA, 21 bp, Artificial Sequence
  Description of Artificial Sequence: Target Sequence/siNA antisense region (stab08)
  misc_feature (20)..(20): Phosphorothioate or Phosphorodithioate 3'-Internucleotide Linkage (optionally present)
  misc_feature (1)..(1): 2'-deoxy-2'Fluoro
  misc_feature (2)..(2): 2'-O-methyl
  misc_feature (3)..(4): 2'-deoxy-2'Fluoro
  misc_feature (5)..(5): 2'-O-methyl
  misc_feature (6)..(6): 2'-deoxy-2'Fluoro
  misc_feature (7)..(7): 2'-O-methyl
  misc_feature (8)..(14): 2'-deoxy-2'Fluoro
  misc_feature (15)..(15): 2'-O-methyl
  misc_feature (16)..(17): 2'-deoxy-2'Fluoro
  misc_feature (18)..(18): 2'-O-methyl
  misc_feature (19)..(19): 2'-deoxy-2'Fluoro
  misc_feature (1)..(19): ribonucleotide unmodified or modified as described for this sequence
uaucaggcaguaccacaagtt

SEQ ID NO: 1768 - DNA, 21 bp, Artificial Sequence
  Description of Artificial Sequence: Target Sequence/siNA antisense region (stab08)
  misc_feature (20)..(20): Phosphorothioate or Phosphorodithioate 3'-Internucleotide Linkage (optionally present)
  misc_feature (1)..(15): 2'-deoxy-2'Fluoro
  misc_feature (16)..(16): 2'-O-methyl
  misc_feature (17)..(19): 2'-deoxy-2'Fluoro
  misc_feature (1)..(19): ribonucleotide unmodified or modified as described for this sequence
acccuaucaggcaguaccatt

SEQ ID NO: 1769 - DNA, 21 bp, Artificial Sequence
  Description of Artificial Sequence: Target Sequence/siNA antisense region (stab08)
  misc_feature (20)..(20): Phosphorothioate or Phosphorodithioate 3'-Internucleotide Linkage (optionally present)
  misc_feature (1)..(6): 2'-deoxy-2'Fluoro
  misc_feature (7)..(7): 2'-O-methyl
  misc_feature (8)..(13): 2'-deoxy-2'Fluoro
  misc_feature (14)..(14): 2'-O-methyl
  misc_feature (15)..(19): 2'-deoxy-2'Fluoro
  misc_feature (1)..(19): ribonucleotide unmodified or modified as described for this sequence
ucgcaagcacccuaucaggtt

SEQ ID NO: 1770 - DNA, 21 bp, Artificial Sequence
  Description of Artificial Sequence: Target Sequence/siNA antisense region (stab08)
  misc_feature (20)..(20): Phosphorothioate or Phosphorodithioate 3'-Internucleotide Linkage (optionally present)
  misc_feature (1)..(7): 2'-deoxy-2'Fluoro
  misc_feature (8)..(8): 2'-O-methyl
  misc_feature (9)..(19): 2'-deoxy-2'Fluoro
  misc_feature (1)..(19): ribonucleotide unmodified or modified as described for this sequence
cacucgcaagcacccuauctt

SEQ ID NO: 1771 - DNA, 21 bp, Artificial Sequence
  Description of Artificial Sequence: Target Sequence/siNA antisense region (stab08)
  misc_feature (20)..(20): Phosphorothioate or Phosphorodithioate 3'-Internucleotide Linkage (optionally present)
  misc_feature (1)..(1): 2'-deoxy-2'Fluoro
  misc_feature (2)..(2): 2'-O-methyl
  misc_feature (3)..(7): 2'-deoxy-2'Fluoro
  misc_feature (8)..(8): 2'-O-methyl
  misc_feature (9)..(19): 2'-deoxy-2'Fluoro
  misc_feature (1)..(19): ribonucleotide unmodified or modified as described for this sequence
cacucgcaagcacccuauctt

SEQ ID NO: 1772 - DNA, 21 bp, Artificial Sequence
  Description of Artificial Sequence: Target Sequence/siNA sense region (stab07)
  misc_feature (1)..(1): 5'-3 attached terminal deoxyabasic moiety, inverted abasic, inverted nucleotide or other terminal cap that is optionally present
  misc_feature (21)..(21): 3'-3 attached terminal deoxyabasic moiety, inverted abasic, inverted nucleotide or other terminal cap that is optionally present
  misc_feature (1)..(2): 2'-deoxy-2'Fluoro
  misc_feature (3)..(9): 2'-deoxy
  misc_feature (10)..(11): 2'-deoxy-2'Fluoro
  misc_feature (12)..(12): 2'-deoxy
  misc_feature (13)..(13): 2'-deoxy-2'Fluoro
  misc_feature (14)..(15): 2'-deoxy
  misc_feature (16)..(16): 2'-deoxy-2'Fluoro
  misc_feature (17)..(18): 2'-deoxy
  misc_feature (19)..(19): 2'-deoxy-2'Fluoro
  misc_feature (1)..(19): ribonucleotide unmodified or modified as described for this sequence
ccgggagagccauaguggutt

SEQ ID NO: 1773 - DNA, 21 bp, Artificial Sequence
  Description of Artificial Sequence: Target Sequence/siNA sense region (stab07)
  misc_feature (1)..(1): 5'-3 attached terminal deoxyabasic moiety, inverted abasic, inverted nucleotide or other terminal cap that is optionally present
  misc_feature (21)..(21): 3'-3 attached terminal deoxyabasic moiety, inverted abasic, inverted nucleotide or other terminal cap that is optionally present
  misc_feature (1)..(1): 2'-deoxy-2'Fluoro
  misc_feature (2)..(8): 2'-deoxy
  misc_feature (9)..(10): 2'-deoxy-2'Fluoro
  misc_feature (11)..(11): 2'-deoxy
  misc_feature (12)..(12): 2'-deoxy-2'Fluoro
  misc_feature (13)..(14): 2'-deoxy
  misc_feature (15)..(15): 2'-deoxy-2'Fluoro
  misc_feature (16)..(17): 2'-deoxy
  misc_feature (18)..(19): 2'-deoxy-2'Fluoro
  misc_feature (1)..(19): ribonucleotide unmodified or modified as described for this sequence
cgggagagccauagugguctt

SEQ ID NO: 1774 - DNA, 21 bp, Artificial Sequence
  Description of Artificial Sequence: Target Sequence/siNA sense region (stab07)
  misc_feature (1)..(1): 5'-3 attached terminal deoxyabasic moiety, inverted abasic, inverted nucleotide or other terminal cap that is optionally present
  misc_feature (21)..(21): 3'-3 attached terminal deoxyabasic moiety, inverted abasic, inverted nucleotide or other terminal cap that is optionally present
  misc_feature (1)..(7): 2'-deoxy
  misc_feature (8)..(9): 2'-deoxy-2'Fluoro
  misc_feature (10)..(10): 2'-deoxy
  misc_feature (11)..(11): 2'-deoxy-2'Fluoro
  misc_feature (12)..(13): 2'-deoxy
  misc_feature (14)..(14): 2'-deoxy-2'Fluoro
  misc_feature (15)..(16): 2'-deoxy
  misc_feature (17)..(19): 2'-deoxy-2'Fluoro
  misc_feature (1)..(19): ribonucleotide unmodified or modified as described for this sequence
gggagagccauaguggucutt

SEQ ID NO: 1775 - DNA, 21 bp, Artificial Sequence
  Description of Artificial Sequence: Target Sequence/siNA sense region (stab07)
  misc_feature (1)..(1): 5'-3 attached terminal deoxyabasic moiety, inverted abasic, inverted nucleotide or other terminal cap that is optionally present
  misc_feature (21)..(21): 3'-3 attached terminal deoxyabasic moiety, inverted abasic, inverted nucleotide or other terminal cap that is optionally present
  misc_feature (1)..(1): 2'-deoxy
  misc_feature (2)..(2): 2'-deoxy-2'Fluoro
  misc_feature (3)..(4): 2'-deoxy
  misc_feature (5)..(7): 2'-deoxy-2'Fluoro
  misc_feature (8)..(8): 2'-deoxy
  misc_feature (9)..(9): 2'-deoxy-2'Fluoro
  misc_feature (10)..(13): 2'-deoxy
  misc_feature (14)..(15): 2'-deoxy-2'Fluoro
  misc_feature (16)..(17): 2'-deoxy
  misc_feature (18)..(18): 2'-deoxy-2'Fluoro
  misc_feature (19)..(19): 2'-deoxy
  misc_feature (1)..(19): ribonucleotide unmodified or modified as described for this sequence
guggucugcggaaccggugtt

SEQ ID NO: 1776 - DNA, 21 bp, Artificial Sequence
  Description of Artificial Sequence: Target Sequence/siNA sense region (stab07)
  misc_feature (1)..(1): 5'-3 attached terminal deoxyabasic moiety, inverted abasic, inverted nucleotide or other terminal cap that is optionally present
  misc_feature (21)..(21): 3'-3 attached terminal deoxyabasic moiety, inverted abasic, inverted nucleotide or other terminal cap that is optionally present
  misc_feature (1)..(1): 2'-deoxy-2'Fluoro
  misc_feature (2)..(3): 2'-deoxy
  misc_feature (4)..(6): 2'-deoxy-2'Fluoro
  misc_feature (7)..(7): 2'-deoxy
  misc_feature (8)..(8): 2'-deoxy-2'Fluoro
  misc_feature (9)..(12): 2'-deoxy
  misc_feature (13)..(14): 2'-deoxy-2'Fluoro
  misc_feature (15)..(16): 2'-deoxy
  misc_feature (17)..(17): 2'-deoxy-2'Fluoro
  misc_feature (18)..(19): 2'-deoxy
  misc_feature (1)..(19): ribonucleotide unmodified or modified as described for this sequence
uggucugcggaaccggugatt

SEQ ID NO: 1777 - DNA, 21 bp, Artificial Sequence
  Description of Artificial Sequence: Target Sequence/siNA sense region (stab07)
  misc_feature (1)..(1): 5'-3 attached terminal deoxyabasic moiety, inverted abasic, inverted nucleotide or other terminal cap that is optionally present
  misc_feature (21)..(21): 3'-3 attached terminal deoxyabasic moiety, inverted abasic, inverted nucleotide or other terminal cap that is optionally present
  misc_feature (1)..(2): 2'-deoxy
  misc_feature (3)..(5): 2'-deoxy-2'Fluoro
  misc_feature (6)..(6): 2'-deoxy
  misc_feature (7)..(7): 2'-deoxy-2'Fluoro
  misc_feature (8)..(11): 2'-deoxy
  misc_feature (12)..(13): 2'-deoxy-2'Fluoro
  misc_feature (14)..(15): 2'-deoxy
  misc_feature (16)..(16): 2'-deoxy-2'Fluoro
  misc_feature (17)..(19): 2'-deoxy
  misc_feature (1)..(19): ribonucleotide unmodified or modified as described for this sequence
ggucugcggaaccggugagtt

SEQ ID NO: 1778 - DNA, 21 bp, Artificial Sequence
  Description of Artificial Sequence: Target Sequence/siNA sense region (stab07)
  misc_feature (1)..(1): 5'-3 attached terminal deoxyabasic moiety, inverted abasic, inverted nucleotide or other terminal cap that is optionally present
  misc_feature (21)..(21): 3'-3 attached terminal deoxyabasic moiety, inverted abasic, inverted nucleotide or other terminal cap that is optionally present
  misc_feature (1)..(1): 2'-deoxy
  misc_feature (2)..(4): 2'-deoxy-2'Fluoro
  misc_feature (5)..(5): 2'-deoxy
  misc_feature (6)..(6): 2'-deoxy-2'Fluoro
  misc_feature (7)..(10): 2'-deoxy
  misc_feature (11)..(12): 2'-deoxy-2'Fluoro
  misc_feature (13)..(14): 2'-deoxy
  misc_feature (15)..(15): 2'-deoxy-2'Fluoro
  misc_feature (16)..(18): 2'-deoxy
  misc_feature (19)..(19): 2'-deoxy-2'Fluoro
  misc_feature (1)..(19): ribonucleotide unmodified or modified as described for this sequence
gucugcggaaccggugagutt

SEQ ID NO: 1779 - DNA, 21 bp, Artificial Sequence
  Description of Artificial Sequence: Target Sequence/siNA sense region (stab07)
  misc_feature (1)..(1): 5'-3 attached terminal deoxyabasic moiety, inverted abasic, inverted nucleotide or other terminal cap that is optionally present
  misc_feature (21)..(21): 3'-3 attached terminal deoxyabasic moiety, inverted abasic, inverted nucleotide or other terminal cap that is optionally present
  misc_feature (1)..(3): 2'-deoxy-2'Fluoro
  misc_feature (4)..(4): 2'-deoxy
  misc_feature (5)..(5): 2'-deoxy-2'Fluoro
  misc_feature (6)..(9): 2'-deoxy
  misc_feature (10)..(11): 2'-deoxy-2'Fluoro
  misc_feature (12)..(13): 2'-deoxy
  misc_feature (14)..(14): 2'-deoxy-2'Fluoro
  misc_feature (15)..(17): 2'-deoxy
  misc_feature (18)..(18): 2'-deoxy-2'Fluoro
  misc_feature (19)..(19): 2'-deoxy
  misc_feature (1)..(19): ribonucleotide unmodified or modified as described for this sequence
ucugcggaaccggugaguatt

SEQ ID NO: 1780 - DNA, 21 bp, Artificial Sequence
  Description of Artificial Sequence: Target Sequence/siNA sense region (stab07)
  misc_feature (1)..(1): 5'-3 attached terminal deoxyabasic moiety, inverted abasic, inverted nucleotide or other terminal cap that is optionally present
  misc_feature (21)..(21): 3'-3 attached terminal deoxyabasic moiety, inverted abasic, inverted nucleotide or other terminal cap that is optionally present
  misc_feature (1)..(1): 2'-deoxy-2'Fluoro
  misc_feature (2)..(2): 2'-deoxy
  misc_feature (3)..(3): 2'-deoxy-2'Fluoro
  misc_feature (4)..(7): 2'-deoxy
  misc_feature (8)..(9): 2'-deoxy-2'Fluoro
  misc_feature (10)..(11): 2'-deoxy
  misc_feature (12)..(12): 2'-deoxy-2'Fluoro
  misc_feature (13)..(15): 2'-deoxy
  misc_feature (16)..(16): 2'-deoxy-2'Fluoro
  misc_feature (17)..(17): 2'-deoxy
  misc_feature (18)..(18): 2'-deoxy-2'Fluoro
  misc_feature (19)..(19): 2'-deoxy
  misc_feature (1)..(19): ribonucleotide unmodified or modified as described for this sequence
ugcggaaccggugaguacatt

SEQ ID NO: 1781 - DNA, 21 bp, Artificial Sequence
  Description of Artificial Sequence: Target Sequence/siNA sense region (stab07)
  misc_feature (1)..(1): 5'-3 attached terminal deoxyabasic moiety, inverted abasic, inverted nucleotide or other terminal cap that is optionally present
  misc_feature (21)..(21): 3'-3 attached terminal deoxyabasic moiety, inverted abasic, inverted nucleotide or other terminal cap that is optionally present
  misc_feature (1)..(1): 2'-deoxy
  misc_feature (2)..(2): 2'-deoxy-2'Fluoro
  misc_feature (3)..(6): 2'-deoxy
  misc_feature (7)..(8): 2'-deoxy-2'Fluoro
  misc_feature (9)..(10): 2'-deoxy
  misc_feature (11)..(11): 2'-deoxy-2'Fluoro
  misc_feature (12)..(14): 2'-deoxy
  misc_feature (15)..(15): 2'-deoxy-2'Fluoro
  misc_feature (16)..(16): 2'-deoxy
  misc_feature (17)..(17): 2'-deoxy-2'Fluoro
  misc_feature (18)..(18): 2'-deoxy
  misc_feature (19)..(19): 2'-deoxy-2'Fluoro
  misc_feature (1)..(19): ribonucleotide unmodified or modified as described for this sequence
gcggaaccggugaguacactt

SEQ ID NO: 1782 - DNA, 21 bp, Artificial Sequence
  Description of Artificial Sequence: Target Sequence/siNA sense region (stab07)
  misc_feature (1)..(1): 5'-3 attached terminal deoxyabasic moiety, inverted abasic, inverted nucleotide or other terminal cap that is optionally present
  misc_feature (21)..(21): 3'-3 attached terminal deoxyabasic moiety, inverted abasic, inverted nucleotide or other terminal cap that is optionally present
  misc_feature (1)..(3): 2'-deoxy
  misc_feature (4)..(5): 2'-deoxy-2'Fluoro
  misc_feature (6)..(7): 2'-deoxy
  misc_feature (8)..(8): 2'-deoxy-2'Fluoro
  misc_feature (9)..(11): 2'-deoxy
  misc_feature (12)..(12): 2'-deoxy-2'Fluoro
  misc_feature (13)..(13): 2'-deoxy
  misc_feature (14)..(14): 2'-deoxy-2'Fluoro
  misc_feature (15)..(15): 2'-deoxy
  misc_feature (16)..(17): 2'-deoxy-2'Fluoro
  misc_feature (18)..(19): 2'-deoxy
  misc_feature (1)..(19): ribonucleotide unmodified or modified as described for this sequence
gaaccggugaguacaccggtt

SEQ ID NO: 1783 - DNA, 21 bp, Artificial Sequence
  Description of Artificial Sequence: Target Sequence/siNA sense region (stab07)
  misc_feature (1)..(1): 5'-3 attached terminal deoxyabasic moiety, inverted abasic, inverted nucleotide or other terminal cap that is optionally present
  misc_feature (21)..(21): 3'-3 attached terminal deoxyabasic moiety, inverted abasic, inverted nucleotide or other terminal cap that is optionally present
  misc_feature (1)..(2): 2'-deoxy
  misc_feature (3)..(4): 2'-deoxy-2'Fluoro
  misc_feature (5)..(6): 2'-deoxy
  misc_feature (7)..(7): 2'-deoxy-2'Fluoro
  misc_feature (8)..(10): 2'-deoxy
  misc_feature (11)..(11): 2'-deoxy-2'Fluoro
  misc_feature (12)..(12): 2'-deoxy
  misc_feature (13)..(13): 2'-deoxy-2'Fluoro
  misc_feature (14)..(14): 2'-deoxy
  misc_feature (15)..(16): 2'-deoxy-2'Fluoro
  misc_feature (17)..(19): 2'-deoxy
  misc_feature (1)..(19): ribonucleotide unmodified or modified as described for this sequence
aaccggugaguacaccggatt

SEQ ID NO: 1784 - DNA, 21 bp, Artificial Sequence
  Description of Artificial Sequence: Target Sequence/siNA sense region (stab07)
  misc_feature (1)..(1): 5'-3 attached terminal deoxyabasic moiety, inverted abasic, inverted nucleotide or other terminal cap that is optionally present
  misc_feature (21)..(21): 3'-3 attached terminal deoxyabasic moiety, inverted abasic, inverted nucleotide or other terminal cap that is optionally present
  misc_feature (1)..(1): 2'-deoxy
  misc_feature (2)..(3): 2'-deoxy-2'Fluoro
  misc_feature (4)..(5): 2'-deoxy
  misc_feature (6)..(6): 2'-deoxy-2'Fluoro
  misc_feature (7)..(9): 2'-deoxy
  misc_feature (10)..(10): 2'-deoxy-2'Fluoro
  misc_feature (11)..(11): 2'-deoxy
  misc_feature (12)..(12): 2'-deoxy-2'Fluoro
  misc_feature (13)..(13): 2'-deoxy
  misc_feature (14)..(15): 2'-deoxy-2'Fluoro
  misc_feature (16)..(19): 2'-deoxy
  misc_feature (1)..(19): ribonucleotide unmodified or modified as described for this sequence
accggugaguacaccggaatt

SEQ ID NO: 1785 - DNA, 21 bp, Artificial Sequence
  Description of Artificial Sequence: Target Sequence/siNA sense region (stab07)
  misc_feature (1)..(1): 5'-3 attached terminal deoxyabasic moiety, inverted abasic, inverted nucleotide or other terminal cap that is optionally present
  misc_feature (21)..(21): 3'-3 attached terminal deoxyabasic moiety, inverted abasic, inverted nucleotide or other terminal cap that is optionally present
  misc_feature (1)..(2): 2'-deoxy-2'Fluoro
  misc_feature (3)..(4): 2'-deoxy
  misc_feature (5)..(5): 2'-deoxy-2'Fluoro
  misc_feature (6)..(8): 2'-deoxy
  misc_feature (9)..(9): 2'-deoxy-2'Fluoro
  misc_feature (10)..(10): 2'-deoxy
  misc_feature (11)..(11): 2'-deoxy-2'Fluoro
  misc_feature (12)..(12): 2'-deoxy
  misc_feature (13)..(14): 2'-deoxy-2'Fluoro
  misc_feature (15)..(18): 2'-deoxy
  misc_feature (19)..(19): 2'-deoxy-2'Fluoro
  misc_feature (1)..(19): ribonucleotide unmodified or modified as described for this sequence
ccggugaguacaccggaautt

SEQ ID NO: 1786 - DNA, 21 bp, Artificial Sequence
  Description of Artificial Sequence: Target Sequence/siNA sense region (stab07)
  misc_feature (1)..(1): 5'-3 attached terminal deoxyabasic moiety, inverted abasic, inverted nucleotide or other terminal cap that is optionally present
  misc_feature (21)..(21): 3'-3 attached terminal deoxyabasic moiety, inverted abasic, inverted nucleotide or other terminal cap that is optionally present
  misc_feature (1)..(1): 2'-deoxy
  misc_feature (2)..(2): 2'-deoxy-2'Fluoro
  misc_feature (3)..(8): 2'-deoxy
  misc_feature (9)..(12): 2'-deoxy-2'Fluoro
  misc_feature (13)..(13): 2'-deoxy
  misc_feature (14)..(14): 2'-deoxy-2'Fluoro
  misc_feature (15)..(16): 2'-deoxy
  misc_feature (17)..(17): 2'-deoxy-2'Fluoro
  misc_feature (18)..(18): 2'-deoxy
  misc_feature (19)..(19): 2'-deoxy-2'Fluoro
  misc_feature (1)..(19): ribonucleotide unmodified or modified as described for this sequence
gcgaaaggccuugugguactt

SEQ ID NO: 1787 - DNA, 21 bp, Artificial Sequence
  Description of Artificial Sequence: Target Sequence/siNA sense region (stab07)
  misc_feature (1)..(1): 5'-3 attached terminal deoxyabasic moiety, inverted abasic, inverted nucleotide or other terminal cap that is optionally present
  misc_feature (21)..(21): 3'-3 attached terminal deoxyabasic moiety, inverted abasic, inverted nucleotide or other terminal cap that is optionally present
  misc_feature (1)..(1): 2'-deoxy-2'Fluoro
  misc_feature (2)..(7): 2'-deoxy
  misc_feature (8)..(11): 2'-deoxy-2'Fluoro
  misc_feature (12)..(12): 2'-deoxy
  misc_feature (13)..(13): 2'-deoxy-2'Fluoro
  misc_feature (14)..(15): 2'-deoxy
  misc_feature (16)..(16): 2'-deoxy-2'Fluoro
  misc_feature (17)..(17): 2'-deoxy
  misc_feature (18)..(19): 2'-deoxy-2'Fluoro
  misc_feature (1)..(19): ribonucleotide unmodified or modified as described for this sequence
cgaaaggccuugugguacutt

SEQ ID NO: 1788 - DNA, 21 bp, Artificial Sequence
  Description of Artificial Sequence: Target Sequence/siNA sense region (stab07)
  misc_feature (1)..(1): 5'-3 attached terminal deoxyabasic moiety, inverted abasic, inverted nucleotide or other terminal cap that is optionally present
  misc_feature (21)..(21): 3'-3 attached terminal deoxyabasic moiety, inverted abasic, inverted nucleotide or other terminal cap that is optionally present
  misc_feature (1)..(6): 2'-deoxy
  misc_feature (7)..(10): 2'-deoxy-2'Fluoro
  misc_feature (11)..(11): 2'-deoxy
  misc_feature (12)..(12): 2'-deoxy-2'Fluoro
  misc_feature (13)..(14): 2'-deoxy
  misc_feature (15)..(15): 2'-deoxy-2'Fluoro
  misc_feature (16)..(16): 2'-deoxy
  misc_feature (17)..(18): 2'-deoxy-2'Fluoro
  misc_feature (19)..(19): 2'-deoxy
  misc_feature (1)..(19): ribonucleotide unmodified or modified as described for this sequence
gaaaggccuugugguacugtt

SEQ ID NO: 1789 - DNA, 21 bp, Artificial Sequence
  Description of Artificial Sequence: Target Sequence/siNA sense region (stab07)
  misc_feature (1)..(1): 5'-3 attached terminal deoxyabasic moiety, inverted abasic, inverted nucleotide or other terminal cap that is optionally present
  misc_feature (21)..(21): 3'-3 attached terminal deoxyabasic moiety, inverted abasic, inverted nucleotide or other terminal cap that is optionally present
  misc_feature (1)..(5): 2'-deoxy
  misc_feature (6)..(9): 2'-deoxy-2'Fluoro
  misc_feature (10)..(10): 2'-deoxy
  misc_feature (11)..(11): 2'-deoxy-2'Fluoro
  misc_feature (12)..(13): 2'-deoxy
  misc_feature (14)..(14): 2'-deoxy-2'Fluoro
  misc_feature (15)..(15): 2'-deoxy
  misc_feature (16)..(17): 2'-deoxy-2'Fluoro
  misc_feature (18)..(18): 2'-deoxy
  misc_feature (19)..(19): 2'-deoxy-2'Fluoro
  misc_feature (1)..(19): ribonucleotide unmodified or modified as described for this sequence
aaaggccuugugguacugctt

SEQ ID NO: 1790 - DNA, 21 bp, Artificial Sequence
  Description of Artificial Sequence: Target Sequence/siNA sense region (stab07)
  misc_feature (1)..(1): 5'-3 attached terminal deoxyabasic moiety, inverted abasic, inverted nucleotide or other terminal cap that is optionally present
  misc_feature (21)..(21): 3'-3 attached terminal deoxyabasic moiety, inverted abasic, inverted nucleotide or other terminal cap that is optionally present
  misc_feature (1)..(4): 2'-deoxy
  misc_feature (5)..(8): 2'-deoxy-2'Fluoro
  misc_feature (9)..(9): 2'-deoxy
  misc_feature (10)..(10): 2'-deoxy-2'Fluoro
  misc_feature (11)..(12): 2'-deoxy
  misc_feature (13)..(13): 2'-deoxy-2'Fluoro
  misc_feature (14)..(14): 2'-deoxy
  misc_feature (15)..(16): 2'-deoxy-2'Fluoro
  misc_feature (17)..(17): 2'-deoxy
  misc_feature (18)..(19): 2'-deoxy-2'Fluoro
  misc_feature (1)..(19): ribonucleotide unmodified or modified as described for this sequence
aaggccuugugguacugcctt

SEQ ID NO: 1791 - DNA, 21 bp, Artificial Sequence
  Description of Artificial Sequence: Target Sequence/siNA sense region (stab07)
  misc_feature (1)..(1): 5'-3 attached terminal deoxyabasic moiety, inverted abasic, inverted nucleotide or other terminal cap that is optionally present
  misc_feature (21)..(21): 3'-3 attached terminal deoxyabasic moiety, inverted abasic, inverted nucleotide or other terminal cap that is optionally present
  misc_feature (1)..(2): 2'-deoxy
  misc_feature (3)..(6): 2'-deoxy-2'Fluoro
  misc_feature (7)..(7): 2'-deoxy
  misc_feature (8)..(8): 2'-deoxy-2'Fluoro
  misc_feature (9)..(10): 2'-deoxy
  misc_feature (11)..(11): 2'-deoxy-2'Fluoro
  misc_feature (12)..(12): 2'-deoxy
  misc_feature (13)..(14): 2'-deoxy-2'Fluoro
  misc_feature (15)..(15): 2'-deoxy
  misc_feature (16)..(18): 2'-deoxy-2'Fluoro
  misc_feature (19)..(19): 2'-deoxy
  misc_feature (1)..(19): ribonucleotide unmodified or modified as described for this sequence
ggccuugugguacugccugtt

SEQ ID NO: 1792 - DNA, 21 bp, Artificial Sequence
  Description of Artificial Sequence: Target Sequence/siNA sense region (stab07)
  misc_feature (1)..(1): 5'-3 attached terminal deoxyabasic moiety, inverted abasic, inverted nucleotide or other terminal cap that is optionally present
  misc_feature (21)..(21): 3'-3 attached terminal deoxyabasic moiety, inverted abasic, inverted nucleotide or other terminal cap that is optionally present
  misc_feature (1)..(1): 2'-deoxy
  misc_feature (2)..(5): 2'-deoxy-2'Fluoro
  misc_feature (6)..(6): 2'-deoxy
  misc_feature (7)..(7): 2'-deoxy-2'Fluoro
  misc_feature (8)..(9): 2'-deoxy
  misc_feature (10)..(10): 2'-deoxy-2'Fluoro
  misc_feature (11)..(11): 2'-deoxy
  misc_feature (12)..(13): 2'-deoxy-2'Fluoro
  misc_feature (14)..(14): 2'-deoxy
  misc_feature (15)..(17): 2'-deoxy-2'Fluoro
  misc_feature (18)..(19): 2'-deoxy
  misc_feature (1)..(19): ribonucleotide unmodified or modified as described for this sequence
gccuugugguacugccugatt

SEQ ID NO: 1793 - DNA, 21 bp, Artificial Sequence
  Description of Artificial Sequence: Target Sequence/siNA sense region (stab07)
  misc_feature (1)..(1): 5'-3 attached terminal deoxyabasic moiety, inverted abasic, inverted nucleotide or other terminal cap that is optionally present
  misc_feature (21)..(21): 3'-3 attached terminal deoxyabasic moiety, inverted abasic, inverted nucleotide or other terminal cap that is optionally present
  misc_feature (1)..(4): 2'-deoxy-2'Fluoro
  misc_feature (5)..(5): 2'-deoxy
  misc_feature (6)..(6): 2'-deoxy-2'Fluoro
  misc_feature (7)..(8): 2'-deoxy
  misc_feature (9)..(9): 2'-deoxy-2'Fluoro
  misc_feature (10)..(10): 2'-deoxy
  misc_feature (11)..(12): 2'-deoxy-2'Fluoro
  misc_feature (13)..(13): 2'-deoxy
  misc_feature (14)..(16): 2'-deoxy-2'Fluoro
  misc_feature (17)..(18): 2'-deoxy
  misc_feature (19)..(19): 2'-deoxy-2'Fluoro
  misc_feature (1)..(19): ribonucleotide unmodified or modified as described for this sequence
ccuugugguacugccugautt

SEQ ID NO: 1794 - DNA, 21 bp, Artificial Sequence
  Description of Artificial Sequence: Target Sequence/siNA sense region (stab07)
  misc_feature (1)..(1): 5'-3 attached terminal deoxyabasic moiety, inverted abasic, inverted nucleotide or other terminal cap that is optionally present
  misc_feature (21)..(21): 3'-3 attached terminal deoxyabasic moiety, inverted abasic, inverted nucleotide or other terminal cap that is optionally present
  misc_feature (1)..(1): 2'-deoxy
  misc_feature (2)..(3): 2'-deoxy-2'Fluoro
  misc_feature (4)..(4): 2'-deoxy
  misc_feature (5)..(7): 2'-deoxy-2'Fluoro
  misc_feature (8)..(9): 2'-deoxy
  misc_feature (10)..(10): 2'-deoxy-2'Fluoro
  misc_feature (11)..(14): 2'-deoxy
  misc_feature (15)..(15): 2'-deoxy-2'Fluoro
  misc_feature (16)..(16): 2'-deoxy
  misc_feature (17)..(19): 2'-deoxy-2'Fluoro
  misc_feature (1)..(19): ribonucleotide unmodified or modified as described for this sequence
acugccugauagggugcuutt

SEQ ID NO: 1795 - DNA, 21 bp, Artificial Sequence
  Description of Artificial Sequence: Target Sequence/siNA sense region (stab07)
  misc_feature (1)..(1): 5'-3 attached terminal deoxyabasic moiety, inverted abasic, inverted nucleotide or other terminal cap that is optionally present
  misc_feature (21)..(21): 3'-3 attached terminal deoxyabasic moiety, inverted abasic, inverted nucleotide or other terminal cap that is optionally present
  misc_feature (1)..(1): 2'-deoxy
  misc_feature (2)..(4): 2'-deoxy-2'Fluoro
  misc_feature (5)..(6): 2'-deoxy
  misc_feature (7)..(7): 2'-deoxy-2'Fluoro
  misc_feature (8)..(11): 2'-deoxy
  misc_feature (12)..(12): 2'-deoxy-2'Fluoro
  misc_feature (13)..(13): 2'-deoxy
  misc_feature (14)..(16): 2'-deoxy-2'Fluoro
  misc_feature (17)..(17): 2'-deoxy
  misc_feature (18)..(18): 2'-deoxy-2'Fluoro
  misc_feature (19)..(19): 2'-deoxy
  misc_feature (1)..(19): ribonucleotide unmodified or modified as described for this sequence
gccugauagggugcuugcgtt

SEQ ID NO: 1796 - DNA, 21 bp, Artificial Sequence
  Description of Artificial Sequence: Target Sequence/siNA sense region (stab07)
  misc_feature (1)..(1): 5'-3 attached terminal deoxyabasic moiety, inverted abasic, inverted nucleotide or other terminal cap that is optionally present
  misc_feature (21)..(21): 3'-3 attached terminal deoxyabasic moiety, inverted abasic, inverted nucleotide or other terminal cap that is optionally present
  misc_feature (1)..(2): 2'-deoxy-2'Fluoro
  misc_feature (3)..(4): 2'-deoxy
  misc_feature (5)..(5): 2'-deoxy-2'Fluoro
  misc_feature (6)..(9): 2'-deoxy
  misc_feature (10)..(10): 2'-deoxy-2'Fluoro
  misc_feature (11)..(11): 2'-deoxy
  misc_feature (12)..(14): 2'-deoxy-2'Fluoro
  misc_feature (15)..(15): 2'-deoxy
  misc_feature (16)..(16): 2'-deoxy-2'Fluoro
  misc_feature (17)..(19): 2'-deoxy
  misc_feature (1)..(19): ribonucleotide unmodified or modified as described for this sequence
cugauagggugcuugcgagtt

SEQ ID NO: 1797 - DNA, 21 bp, Artificial Sequence
  Description of Artificial Sequence: Target Sequence/siNA sense region (stab07)
  misc_feature (1)..(1): 5'-3 attached terminal deoxyabasic moiety, inverted abasic, inverted nucleotide or other terminal cap that is optionally present
  misc_feature (21)..(21): 3'-3 attached terminal deoxyabasic moiety, inverted abasic, inverted nucleotide or other terminal cap that is optionally present
  misc_feature (1)..(1): 2'-deoxy-2'Fluoro
  misc_feature (2)..(3): 2'-deoxy
  misc_feature (4)..(4): 2'-deoxy-2'Fluoro
  misc_feature (5)..(8): 2'-deoxy
  misc_feature (9)..(9): 2'-deoxy-2'Fluoro
  misc_feature (10)..(10): 2'-deoxy
  misc_feature (11)..(13): 2'-deoxy-2'Fluoro
  misc_feature (14)..(14): 2'-deoxy
  misc_feature (15)..(15): 2'-deoxy-2'Fluoro
  misc_feature (16)..(18): 2'-deoxy
  misc_feature (19)..(19): 2'-deoxy-2'Fluoro
  misc_feature (1)..(19): ribonucleotide unmodified or modified as described for this sequence
ugauagggugcuugcgagutt

SEQ ID NO: 1798 - DNA, 21 bp, Artificial Sequence
  Description of Artificial Sequence: Target Sequence/siNA sense region (stab07)
  misc_feature (1)..(1): 5'-3 attached terminal deoxyabasic moiety, inverted abasic, inverted nucleotide or other terminal cap that is optionally present
  misc_feature (21)..(21): 3'-3 attached terminal deoxyabasic moiety, inverted abasic, inverted nucleotide or other terminal cap that is optionally present
  misc_feature (1)..(1): 2'-deoxy
  misc_feature (2)..(2): 2'-deoxy-2'Fluoro
  misc_feature (3)..(6): 2'-deoxy
  misc_feature (7)..(7): 2'-deoxy-2'Fluoro
  misc_feature (8)..(8): 2'-deoxy
  misc_feature (9)..(11): 2'-deoxy-2'Fluoro
  misc_feature (12)..(12): 2'-deoxy
  misc_feature (13)..(13): 2'-deoxy-2'Fluoro
  misc_feature (14)..(16): 2'-deoxy
  misc_feature (17)..(17): 2'-deoxy-2'Fluoro
  misc_feature (18)..(18): 2'-deoxy
  misc_feature (19)..(19): 2'-deoxy-2'Fluoro
  misc_feature (1)..(19): ribonucleotide unmodified or modified as described for this sequence
auagggugcuugcgagugctt

SEQ ID NO: 1799 - DNA, 21 bp, Artificial Sequence
  Description of Artificial Sequence: Target Sequence/siNA sense region (stab07)
  misc_feature (1)..(1): 5'-3 attached terminal deoxyabasic moiety, inverted abasic, inverted nucleotide or other terminal cap that is optionally present
  misc_feature (21)..(21): 3'-3 attached terminal deoxyabasic moiety, inverted abasic, inverted nucleotide or other terminal cap that is optionally present
  misc_feature (1)..(1): 2'-deoxy-2'Fluoro
  misc_feature (2)..(5): 2'-deoxy
  misc_feature (6)..(6): 2'-deoxy-2'Fluoro
  misc_feature (7)..(7): 2'-deoxy
  misc_feature (8)..(10): 2'-deoxy-2'Fluoro
  misc_feature (11)..(11): 2'-deoxy
  misc_feature (12)..(12): 2'-deoxy-2'Fluoro
  misc_feature (13)..(15): 2'-deoxy
  misc_feature (16)..(16): 2'-deoxy-2'Fluoro
  misc_feature (17)..(17): 2'-deoxy
  misc_feature (18)..(19): 2'-deoxy-2'Fluoro
  misc_feature (1)..(19): ribonucleotide unmodified or modified as described for this sequence
uagggugcuugcgagugcctt

SEQ ID NO: 1800 - DNA, 21 bp, Artificial Sequence
  Description of Artificial Sequence: Target Sequence/siNA sense region (stab07)
  misc_feature (1)..(1): 5'-3 attached terminal deoxyabasic moiety, inverted abasic, inverted nucleotide or other terminal cap that is optionally present
  misc_feature (21)..(21): 3'-3 attached terminal deoxyabasic moiety, inverted abasic, inverted nucleotide or other terminal cap that is optionally present
  misc_feature (1)..(3): 2'-deoxy
  misc_feature (4)..(4): 2'-deoxy-2'Fluoro
  misc_feature (5)..(5): 2'-deoxy
  misc_feature (6)..(8): 2'-deoxy-2'Fluoro
  misc_feature (9)..(9): 2'-deoxy
  misc_feature (10)..(10): 2'-deoxy-2'Fluoro
  misc_feature (11)..(13): 2'-deoxy
  misc_feature (14)..(14): 2'-deoxy-2'Fluoro
  misc_feature (15)..(15): 2'-deoxy
  misc_feature (16)..(19): 2'-deoxy-2'Fluoro
  misc_feature (1)..(19): ribonucleotide unmodified or modified as described for this sequence
gggugcuugcgagugcccctt

SEQ ID NO: 1801 - DNA, 21 bp, Artificial Sequence
  Description of Artificial Sequence: Target Sequence/siNA sense region (stab07)
  misc_feature (1)..(1): 5'-3 attached terminal deoxyabasic moiety, inverted abasic, inverted nucleotide or other terminal cap that is optionally present
  misc_feature (21)..(21): 3'-3 attached terminal deoxyabasic moiety, inverted abasic, inverted nucleotide or other terminal cap that is optionally present
  misc_feature (1)..(2): 2'-deoxy
  misc_feature (3)..(3): 2'-deoxy-2'Fluoro
  misc_feature (4)..(4): 2'-deoxy
  misc_feature (5)..(7): 2'-deoxy-2'Fluoro
  misc_feature (8)..(8): 2'-deoxy
  misc_feature (9)..(9): 2'-deoxy-2'Fluoro
  misc_feature (10)..(12): 2'-deoxy
  misc_feature (13)..(13): 2'-deoxy-2'Fluoro
  misc_feature (14)..(14): 2'-deoxy
  misc_feature (15)..(18): 2'-deoxy-2'Fluoro
  misc_feature (19)..(19): 2'-deoxy
  misc_feature (1)..(19): ribonucleotide unmodified or modified as described for this sequence
ggugcuugcgagugccccgtt

SEQ ID NO: 1802 - DNA, 21 bp, Artificial Sequence
  Description of Artificial Sequence: Target Sequence/siNA sense region (stab07)
  misc_feature (1)..(1): 5'-3 attached terminal deoxyabasic moiety, inverted abasic, inverted nucleotide or other terminal cap that is optionally present
  misc_feature (21)..(21): 3'-3 attached terminal deoxyabasic moiety, inverted abasic, inverted nucleotide or other terminal cap that is optionally present
  misc_feature (1)..(1): 2'-deoxy
  misc_feature (2)..(4): 2'-deoxy-2'Fluoro
  misc_feature (5)..(5): 2'-deoxy
  misc_feature (6)..(6): 2'-deoxy-2'Fluoro
  misc_feature (7)..(9): 2'-deoxy
  misc_feature (10)..(10): 2'-deoxy-2'Fluoro
  misc_feature (11)..(11): 2'-deoxy
  misc_feature (12)..(15): 2'-deoxy-2'Fluoro
  misc_feature (16)..(19): 2'-deoxy
  misc_feature (1)..(19): ribonucleotide unmodified or modified as described for this sequence
gcuugcgagugccccgggatt

SEQ ID NO: 1803 - DNA, 21 bp, Artificial Sequence
  Description of Artificial Sequence: Target Sequence/siNA sense region (stab07)
  misc_feature (1)..(1): 5'-3 attached terminal deoxyabasic moiety, inverted abasic, inverted nucleotide or other terminal cap that is optionally present
  misc_feature (21)..(21): 3'-3 attached terminal deoxyabasic moiety, inverted abasic, inverted nucleotide or other terminal cap that is optionally present
  misc_feature (1)..(3): 2'-deoxy-2'Fluoro
  misc_feature (4)..(4): 2'-deoxy
  misc_feature (5)..(5): 2'-deoxy-2'Fluoro
  misc_feature (6)..(8): 2'-deoxy
  misc_feature (9)..(9): 2'-deoxy-2'Fluoro
  misc_feature (10)..(10): 2'-deoxy
  misc_feature (11)..(14): 2'-deoxy-2'Fluoro
  misc_feature (15)..(19): 2'-deoxy
  misc_feature (1)..(19): ribonucleotide unmodified or modified as described for this sequence
cuugcgagugccccgggagtt

SEQ ID NO: 1804 - DNA, 21 bp, Artificial Sequence
  Description of Artificial Sequence: Target Sequence/siNA sense region (stab07)
  misc_feature (1)..(1): 5'-3 attached terminal deoxyabasic moiety, inverted abasic, inverted nucleotide or other terminal cap that is optionally present
  misc_feature (21)..(21): 3'-3 attached terminal deoxyabasic moiety, inverted abasic, inverted nucleotide or other terminal cap that is optionally present
  misc_feature (1)..(2): 2'-deoxy-2'Fluoro
  misc_feature (3)..(3): 2'-deoxy
  misc_feature (4)..(4): 2'-deoxy-2'Fluoro
  misc_feature (5)..(7): 2'-deoxy
  misc_feature (8)..(8): 2'-deoxy-2'Fluoro
  misc_feature (9)..(9): 2'-deoxy
  misc_feature (10)..(13): 2'-deoxy-2'Fluoro
  misc_feature (14)..(19): 2'-deoxy
  misc_feature (1)..(19): ribonucleotide unmodified or modified as described for this sequence
uugcgagugccccgggaggtt

SEQ ID NO: 1805 - DNA, 21 bp, Artificial Sequence
  Description of Artificial Sequence: Target Sequence/siNA sense region (stab07)
  misc_feature (1)..(1): 5'-3 attached terminal deoxyabasic moiety, inverted abasic, inverted nucleotide or other terminal cap that is optionally present
  misc_feature (21)..(21): 3'-3 attached terminal deoxyabasic moiety, inverted abasic, inverted nucleotide or other terminal cap that is optionally present
  misc_feature (1)..(1): 2'-deoxy-2'Fluoro
  misc_feature (2)..(2): 2'-deoxy
  misc_feature (3)..(3): 2'-deoxy-2'Fluoro
  misc_feature (4)..(6): 2'-deoxy
  misc_feature (7)..(7): 2'-deoxy-2'Fluoro
  misc_feature (8)..(8): 2'-deoxy
  misc_feature (9)..(12): 2'-deoxy-2'Fluoro
  misc_feature (13)..(18): 2'-deoxy
  misc_feature (19)..(19): 2'-deoxy-2'Fluoro
  misc_feature (1)..(19): ribonucleotide unmodified or modified as described for this sequence
ugcgagugccccgggaggutt

SEQ ID NO: 1806 - DNA, 21 bp, Artificial Sequence
  Description of Artificial Sequence: Target Sequence/siNA sense region (stab07)
  misc_feature (1)..(1): 5'-3 attached terminal deoxyabasic moiety, inverted abasic, inverted nucleotide or other terminal cap that is optionally present
  misc_feature (21)..(21): 3'-3 attached terminal deoxyabasic moiety, inverted abasic, inverted nucleotide or other terminal cap that is optionally present
  misc_feature (1)..(1): 2'-deoxy
  misc_feature (2)..(2): 2'-deoxy-2'Fluoro
  misc_feature (3)..(5): 2'-deoxy
  misc_feature (6)..(6): 2'-deoxy-2'Fluoro
  misc_feature (7)..(7): 2'-deoxy
  misc_feature (8)..(11): 2'-deoxy-2'Fluoro
  misc_feature (12)..(17): 2'-deoxy
  misc_feature (18)..(19): 2'-deoxy-2'Fluoro
  misc_feature (1)..(19): ribonucleotide unmodified or modified as described for this sequence
gcgagugccccgggagguctt

SEQ ID NO: 1807 - DNA, 21 bp, Artificial Sequence
  Description of Artificial Sequence: Target Sequence/siNA sense region (stab07)
  misc_feature (1)..(1): 5'-3 attached terminal deoxyabasic moiety, inverted abasic, inverted nucleotide or other terminal cap that is optionally present
  misc_feature (21)..(21): 3'-3 attached terminal deoxyabasic moiety, inverted abasic, inverted nucleotide or other terminal cap that is optionally present
  misc_feature (1)..(1): 2'-deoxy-2'Fluoro
  misc_feature (2)..(4): 2'-deoxy
  misc_feature (5)..(5): 2'-deoxy-2'Fluoro
  misc_feature (6)..(6): 2'-deoxy
  misc_feature (7)..(10): 2'-deoxy-2'Fluoro
  misc_feature (11)..(16): 2'-deoxy
  misc_feature (17)..(19): 2'-deoxy-2'Fluoro
  misc_feature (1)..(19): ribonucleotide unmodified or modified as described for this sequence
cgagugccccgggaggucutt

SEQ ID NO: 1808 - DNA, 21 bp, Artificial Sequence
  Description of Artificial Sequence: Target Sequence/siNA sense region (stab07)
  misc_feature (1)..(1): 5'-3 attached terminal deoxyabasic moiety, inverted abasic, inverted nucleotide or other terminal cap that is optionally present
  misc_feature (21)..(21): 3'-3 attached terminal deoxyabasic moiety, inverted abasic, inverted nucleotide or other terminal cap that is optionally present
  misc_feature (1)..(3): 2'-deoxy
  misc_feature (4)..(4): 2'-deoxy-2'Fluoro
  misc_feature (5)..(5): 2'-deoxy
  misc_feature (6)..(9): 2'-deoxy-2'Fluoro
  misc_feature (10)..(15): 2'-deoxy
  misc_feature (16)..(19): 2'-deoxy-2'Fluoro
  misc_feature (1)..(19): ribonucleotide unmodified or modified as described for this sequence
gagugccccgggaggucuctt

SEQ ID NO: 1809 - DNA, 21 bp, Artificial Sequence
  Description of Artificial Sequence: Target Sequence/siNA sense region (stab07)
  misc_feature (1)..(1): 5'-3 attached terminal deoxyabasic moiety, inverted abasic, inverted nucleotide or other terminal cap that is optionally present
  misc_feature (21)..(21): 3'-3 attached terminal deoxyabasic moiety, inverted abasic, inverted nucleotide or other terminal cap that is optionally present
  misc_feature (1)..(1): 2'-deoxy
  misc_feature (2)..(2): 2'-deoxy-2'Fluoro
  misc_feature (3)..(3): 2'-deoxy
  misc_feature (4)..(7): 2'-deoxy-2'Fluoro
  misc_feature (8)..(13): 2'-deoxy
  misc_feature (14)..(17): 2'-deoxy-2'Fluoro
  misc_feature (18)..(18): 2'-deoxy
  misc_feature (19)..(19): 2'-deoxy-2'Fluoro
  misc_feature (1)..(19): ribonucleotide unmodified or modified as described for this sequence
gugccccgggaggucucgutt

SEQ ID NO: 1810 - DNA, 21 bp, Artificial Sequence
  Description of Artificial Sequence: Target Sequence/siNA sense region (stab07)
  misc_feature (1)..(1): 5'-3 attached terminal deoxyabasic moiety, inverted abasic, inverted nucleotide or other terminal cap that is optionally present
  misc_feature (21)..(21): 3'-3 attached terminal deoxyabasic moiety, inverted abasic, inverted nucleotide or other terminal cap that is optionally present
  misc_feature (1)..(1): 2'-deoxy-2'Fluoro
  misc_feature (2)..(2): 2'-deoxy
  misc_feature (3)..(6): 2'-deoxy-2'Fluoro
  misc_feature (7)..(12): 2'-deoxy
  misc_feature (13)..(16): 2'-deoxy-2'Fluoro
  misc_feature (17)..(17): 2'-deoxy
  misc_feature (18)..(18): 2'-deoxy-2'Fluoro
  misc_feature (19)..(19): 2'-deoxy
  misc_feature (1)..(19): ribonucleotide unmodified or modified as described for this sequence
ugccccgggaggucucguatt

SEQ ID NO: 1811 - DNA, 21 bp, Artificial Sequence
  Description of Artificial Sequence: Target Sequence/siNA sense region (stab07)
  misc_feature (1)..(1): 5'-3 attached terminal deoxyabasic moiety, inverted abasic, inverted nucleotide or other terminal cap that is optionally present
  misc_feature (21)..(21): 3'-3 attached terminal deoxyabasic moiety, inverted abasic, inverted nucleotide or other terminal cap that is optionally present
  misc_feature (1)..(5): 2'-deoxy
  misc_feature (6)..(9): 2'-deoxy-2'Fluoro
  misc_feature (10)..(10): 2'-deoxy
  misc_feature (11)..(11): 2'-deoxy-2'Fluoro
  misc_feature (12)..(14): 2'-deoxy
  misc_feature (15)..(16): 2'-deoxy-2'Fluoro
  misc_feature (17)..(17): 2'-deoxy
  misc_feature (18)..(18): 2'-deoxy-2'Fluoro
  misc_feature (19)..(19): 2'-deoxy
  misc_feature (1)..(19): ribonucleotide unmodified or modified as described for this sequence
ggaggucucguagaccgugtt

SEQ ID NO: 1812 - DNA, 21 bp, Artificial Sequence
  Description of Artificial Sequence: Target Sequence/siNA antisense region (stab08)
  misc_feature (20)..(20): Phosphorothioate or Phosphorodithioate 3'-Internucleotide Linkage (optionally present)
  misc_feature (2)..(3): 2'-deoxy-2'Fluoro
  misc_feature (4)..(4): 2'-O-methyl
  misc_feature (5)..(6): 2'-deoxy-2'Fluoro
  misc_feature (7)..(7): 2'-O-methyl
  misc_feature (8)..(8): 2'-deoxy-2'Fluoro
  misc_feature (9)..(10): 2'-O-methyl
  misc_feature (11)..(17): 2'-deoxy-2'Fluoro
  misc_feature (18)..(19): 2'-O-methyl
  misc_feature (1)..(19): ribonucleotide unmodified or modified as described for this sequence
accacuauggcucucccggtt

SEQ ID NO: 1813 - DNA, 21 bp, Artificial Sequence
  Description of Artificial Sequence: Target Sequence/siNA antisense region (stab08)
  misc_feature (20)..(20): Phosphorothioate or Phosphorodithioate 3'-Internucleotide Linkage (optionally present)
  misc_feature (2)..(4): 2'-deoxy-2'Fluoro
  misc_feature (5)..(5): 2'-O-methyl
  misc_feature (6)..(7): 2'-deoxy-2'Fluoro
  misc_feature (8)..(8): 2'-O-methyl
  misc_feature (9)..(9): 2'-deoxy-2'Fluoro
  misc_feature (10)..(11): 2'-O-methyl
  misc_feature (12)..(18): 2'-deoxy-2'Fluoro
  misc_feature (19)..(19): 2'-O-methyl
  misc_feature (1)..(19): ribonucleotide unmodified or modified as described for this sequence
gaccacuauggcucucccgtt

SEQ ID NO: 1814 - DNA, 21 bp, Artificial Sequence
  Description of Artificial Sequence: Target Sequence/siNA antisense region (stab08)
  misc_feature (20)..(20): Phosphorothioate or Phosphorodithioate 3'-Internucleotide Linkage (optionally present)
  misc_feature (4)..(5): 2'-deoxy-2'Fluoro
  misc_feature (6)..(6): 2'-O-methyl
  misc_feature (7)..(8): 2'-deoxy-2'Fluoro
  misc_feature (9)..(9): 2'-O-methyl
  misc_feature (10)..(10): 2'-deoxy-2'Fluoro
  misc_feature (11)..(12): 2'-O-methyl
  misc_feature (13)..(19): 2'-deoxy-2'Fluoro
  misc_feature (1)..(19): ribonucleotide unmodified or modified as described for this sequence
agaccacuauggcucuccctt

SEQ ID NO: 1815 - DNA, 21 bp, Artificial Sequence
  Description of Artificial Sequence: Target Sequence/siNA antisense region (stab08)
  misc_feature (20)..(20): Phosphorothioate or Phosphorodithioate 3'-Internucleotide Linkage (optionally present)
  misc_feature (1)..(1): 2'-deoxy-2'Fluoro
  misc_feature (2)..(2): 2'-O-methyl
  misc_feature (3)..(4): 2'-deoxy-2'Fluoro
  misc_feature (5)..(6): 2'-O-methyl
  misc_feature (7)..(10): 2'-deoxy-2'Fluoro
  misc_feature (11)..(11): 2'-O-methyl
  misc_feature (12)..(12): 2'-deoxy-2'Fluoro
  misc_feature (13)..(15): 2'-O-methyl
  misc_feature (16)..(17): 2'-deoxy-2'Fluoro
  misc_feature (18)..(18): 2'-O-methyl
  misc_feature (19)..(19): 2'-deoxy-2'Fluoro
  misc_feature (1)..(19): ribonucleotide unmodified or modified as described for this sequence
caccgguuccgcagaccactt

SEQ ID NO: 1816 - DNA, 21 bp, Artificial Sequence
  Description of Artificial Sequence: Target Sequence/siNA antisense region (stab08)
  misc_feature (20)..(20): Phosphorothioate or Phosphorodithioate 3'-Internucleotide Linkage (optionally present)
  misc_feature (1)..(2): 2'-deoxy-2'Fluoro
  misc_feature (3)..(3): 2'-O-methyl
  misc_feature (4)..(5): 2'-deoxy-2'Fluoro
  misc_feature (6)..(7): 2'-O-methyl
  misc_feature (8)..(11): 2'-deoxy-2'Fluoro
  misc_feature (12)..(12): 2'-O-methyl
  misc_feature (13)..(13): 2'-deoxy-2'Fluoro
  misc_feature (14)..(16): 2'-O-methyl
  misc_feature (17)..(18): 2'-deoxy-2'Fluoro
  misc_feature (19)..(19): 2'-O-methyl
  misc_feature (1)..(19): ribonucleotide unmodified or modified as described for this sequence
ucaccgguuccgcagaccatt

SEQ ID NO: 1817 - DNA, 21 bp, Artificial Sequence
  Description of Artificial Sequence: Target Sequence/siNA antisense region (stab08)
  misc_feature (20)..(20): Phosphorothioate or Phosphorodithioate 3'-Internucleotide Linkage (optionally present)
  misc_feature (1)..(3): 2'-deoxy-2'Fluoro
  misc_feature (4)..(4): 2'-O-methyl
  misc_feature (5)..(6): 2'-deoxy-2'Fluoro
  misc_feature (7)..(8): 2'-O-methyl
  misc_feature (9)..(12): 2'-deoxy-2'Fluoro
  misc_feature (13)..(13): 2'-O-methyl
  misc_feature (14)..(14): 2'-deoxy-2'Fluoro
  misc_feature (15)..(17): 2'-O-methyl
  misc_feature (18)..(19): 2'-deoxy-2'Fluoro
  misc_feature (1)..(19): ribonucleotide unmodified or modified as described for this sequence
cucaccgguuccgcagacctt

SEQ ID NO: 1818 - DNA, 21 bp, Artificial Sequence
  Description of Artificial Sequence: Target Sequence/siNA antisense region (stab08)
  misc_feature (20)..(20): Phosphorothioate or Phosphorodithioate 3'-Internucleotide Linkage (optionally present)
  misc_feature (2)..(4): 2'-deoxy-2'Fluoro
  misc_feature (5)..(5): 2'-O-methyl
  misc_feature (6)..(7): 2'-deoxy-2'Fluoro
  misc_feature (8)..(9): 2'-O-methyl
  misc_feature (10)..(13): 2'-deoxy-2'Fluoro
  misc_feature (14)..(14): 2'-O-methyl
  misc_feature (15)..(15): 2'-deoxy-2'Fluoro
  misc_feature (16)..(18): 2'-O-methyl
  misc_feature (19)..(19): 2'-deoxy-2'Fluoro
  misc_feature (1)..(19): ribonucleotide unmodified or modified as described for this sequence
acucaccgguuccgcagactt

SEQ ID NO: 1819 - DNA, 21 bp, Artificial Sequence
  Description of Artificial Sequence: Target Sequence/siNA antisense region (stab08)
  misc_feature (20)..(20): Phosphorothioate or Phosphorodithioate 3'-Internucleotide Linkage (optionally present)
  misc_feature (1)..(1): 2'-deoxy-2'Fluoro
  misc_feature (2)..(2): 2'-O-methyl
  misc_feature (3)..(5): 2'-deoxy-2'Fluoro
  misc_feature (6)..(6): 2'-O-methyl
  misc_feature (7)..(8): 2'-deoxy-2'Fluoro
  misc_feature (9)..(10): 2'-O-methyl
  misc_feature (11)..(14): 2'-deoxy-2'Fluoro
  misc_feature (15)..(15): 2'-O-methyl
  misc_feature (16)..(16): 2'-deoxy-2'Fluoro
  misc_feature (17)..(19): 2'-O-methyl
  misc_feature (1)..(19): ribonucleotide unmodified or modified as described for this sequence
uacucaccgguuccgcagatt

SEQ ID NO: 1820 - DNA, 21 bp, Artificial Sequence
  Description of Artificial Sequence: Target Sequence/siNA antisense region (stab08)
  misc_feature (20)..(20): Phosphorothioate or Phosphorodithioate 3'-Internucleotide Linkage (optionally present)
  misc_feature (1)..(1): 2'-deoxy-2'Fluoro
  misc_feature (2)..(2): 2'-O-methyl
  misc_feature (3)..(3): 2'-deoxy-2'Fluoro
  misc_feature (4)..(4): 2'-O-methyl
  misc_feature (5)..(7): 2'-deoxy-2'Fluoro
  misc_feature (8)..(8): 2'-O-methyl
  misc_feature (9)..(10): 2'-deoxy-2'Fluoro
  misc_feature (11)..(12): 2'-O-methyl
  misc_feature (13)..(16): 2'-deoxy-2'Fluoro
  misc_feature (17)..(17): 2'-O-methyl
  misc_feature (18)..(18): 2'-deoxy-2'Fluoro
  misc_feature (19)..(19): 2'-O-methyl
  misc_feature (1)..(19): ribonucleotide unmodified or modified as described for this sequence
uguacucaccgguuccgcatt

SEQ ID NO: 1821 - DNA, 21 bp, Artificial Sequence
  Description of Artificial Sequence: Target Sequence/siNA antisense region (stab08)
  misc_feature (20)..(20): Phosphorothioate or Phosphorodithioate 3'-Internucleotide Linkage (optionally present)
  misc_feature (2)..(2): 2'-deoxy-2'Fluoro
  misc_feature (3)..(3): 2'-O-methyl
  misc_feature (4)..(4): 2'-deoxy-2'Fluoro
  misc_feature (5)..(5): 2'-O-methyl
  misc_feature (6)..(8): 2'-deoxy-2'Fluoro
  misc_feature (9)..(9): 2'-O-methyl
  misc_feature (10)..(11): 2'-deoxy-2'Fluoro
  misc_feature (12)..(13): 2'-O-methyl
  misc_feature (14)..(17): 2'-deoxy-2'Fluoro
  misc_feature (18)..(18): 2'-O-methyl
  misc_feature (19)..(19): 2'-deoxy-2'Fluoro
  misc_feature (1)..(19): ribonucleotide unmodified or modified as described for this sequence
guguacucaccgguuccgctt

SEQ ID NO: 1822 - DNA, 21 bp, Artificial Sequence
  Description of Artificial Sequence: Target Sequence/siNA antisense region (stab08)
  misc_feature (20)..(20): Phosphorothioate or Phosphorodithioate 3'-Internucleotide Linkage (optionally present)
  misc_feature (1)..(2): 2'-deoxy-2'Fluoro
  misc_feature (3)..(4): 2'-O-methyl
  misc_feature (5)..(5): 2'-deoxy-2'Fluoro
  misc_feature (6)..(6): 2'-O-methyl
  misc_feature (7)..(7): 2'-deoxy-2'Fluoro
  misc_feature (8)..(8): 2'-O-methyl
  misc_feature (9)..(11): 2'-deoxy-2'Fluoro
  misc_feature (12)..(12): 2'-O-methyl
  misc_feature (13)..(14): 2'-deoxy-2'Fluoro
  misc_feature (15)..(16): 2'-O-methyl
  misc_feature (17)..(19): 2'-deoxy-2'Fluoro
  misc_feature (1)..(19): ribonucleotide unmodified or modified as described for this sequence
ccgguguacucaccgguuctt

SEQ ID NO: 1823 - DNA, 21 bp, Artificial Sequence
  Description of Artificial Sequence: Target Sequence/siNA antisense region (stab08)
  misc_feature (20)..(20): Phosphorothioate or Phosphorodithioate 3'-Internucleotide Linkage (optionally present)
  misc_feature (1)..(3): 2'-deoxy-2'Fluoro
  misc_feature (4)..(5): 2'-O-methyl
  misc_feature (6)..(6): 2'-deoxy-2'Fluoro
  misc_feature (7)..(7): 2'-O-methyl
  misc_feature (8)..(8): 2'-deoxy-2'Fluoro
  misc_feature (9)..(9): 2'-O-methyl
  misc_feature (10)..(12): 2'-deoxy-2'Fluoro
  misc_feature (13)..(13): 2'-O-methyl
  misc_feature (14)..(15): 2'-deoxy-2'Fluoro
  misc_feature (16)..(17): 2'-O-methyl
  misc_feature (18)..(19): 2'-deoxy-2'Fluoro
  misc_feature (1)..(19): ribonucleotide unmodified or modified as described for this sequence
uccgguguacucaccgguutt

SEQ ID NO: 1824 - DNA, 21 bp, Artificial Sequence
  Description of Artificial Sequence: Target Sequence/siNA antisense region (stab08)
  misc_feature (20)..(20): Phosphorothioate or Phosphorodithioate 3'-Internucleotide Linkage (optionally present)
  misc_feature (1)..(4): 2'-deoxy-2'Fluoro
  misc_feature (5)..(6): 2'-O-methyl
  misc_feature (7)..(7): 2'-deoxy-2'Fluoro
  misc_feature (8)..(8): 2'-O-methyl
  misc_feature (9)..(9): 2'-deoxy-2'Fluoro
  misc_feature (10)..(10): 2'-O-methyl
  misc_feature (11)..(13): 2'-deoxy-2'Fluoro
  misc_feature (14)..(14): 2'-O-methyl
  misc_feature (15)..(16): 2'-deoxy-2'Fluoro
  misc_feature (17)..(18): 2'-O-methyl
  misc_feature (19)..(19): 2'-deoxy-2'Fluoro
  misc_feature (1)..(19): ribonucleotide unmodified or modified as described for this sequence
uuccgguguacucaccggutt

SEQ ID NO: 1825 - DNA, 21 bp, Artificial Sequence
  Description of Artificial Sequence: Target Sequence/siNA antisense region (stab08)
  misc_feature (20)..(20): Phosphorothioate or Phosphorodithioate 3'-Internucleotide Linkage (optionally present)
  misc_feature (2)..(5): 2'-deoxy-2'Fluoro
  misc_feature (6)..(7): 2'-O-methyl
  misc_feature (8)..(8): 2'-deoxy-2'Fluoro
  misc_feature (9)..(9): 2'-O-methyl
  misc_feature (10)..(10): 2'-deoxy-2'Fluoro
  misc_feature (11)..(11): 2'-O-methyl
  misc_feature (12)..(14): 2'-deoxy-2'Fluoro
  misc_feature (15)..(15): 2'-O-methyl
  misc_feature (16)..(17): 2'-deoxy-2'Fluoro
  misc_feature (18)..(19): 2'-O-methyl
  misc_feature (1)..(19): ribonucleotide unmodified or modified as described for this sequence
auuccgguguacucaccggtt

SEQ ID NO: 1826 - DNA, 21 bp, Artificial Sequence
  Description of Artificial Sequence: Target Sequence/siNA antisense region (stab08)
  misc_feature (20)..(20): Phosphorothioate or Phosphorodithioate 3'-Internucleotide Linkage (optionally present)
  misc_feature (2)..(2): 2'-deoxy-2'Fluoro
  misc_feature (3)..(3): 2'-O-methyl
  misc_feature (4)..(5): 2'-deoxy-2'Fluoro
  misc_feature (6)..(6): 2'-O-methyl
  misc_feature (7)..(7): 2'-deoxy-2'Fluoro
  misc_feature (8)..(11): 2'-O-methyl
  misc_feature (12)..(17): 2'-deoxy-2'Fluoro
  misc_feature (18)..(18): 2'-O-methyl
  misc_feature (19)..(19): 2'-deoxy-2'Fluoro
  misc_feature (1)..(19): ribonucleotide unmodified or modified as described for this sequence
guaccacaaggccuuucgctt

SEQ ID NO: 1827 - DNA, 21 bp, Artificial Sequence
  Description of Artificial Sequence: Target Sequence/siNA antisense region (stab08)
  misc_feature (20)..(20): Phosphorothioate or Phosphorodithioate 3'-Internucleotide Linkage (optionally present)
  misc_feature (3)..(3): 2'-deoxy-2'Fluoro
  misc_feature (4)..(4): 2'-O-methyl
  misc_feature (5)..(6): 2'-deoxy-2'Fluoro
  misc_feature (7)..(7): 2'-O-methyl
  misc_feature (8)..(8): 2'-deoxy-2'Fluoro
  misc_feature (9)..(12): 2'-O-methyl
  misc_feature (13)..(18): 2'-deoxy-2'Fluoro
  misc_feature (19)..(19): 2'-O-methyl
  misc_feature (1)..(19): ribonucleotide unmodified or modified as described for this sequence
aguaccacaaggccuuucgtt

SEQ ID NO: 1828 - DNA, 21 bp, Artificial Sequence
  Description of Artificial Sequence: Target Sequence/siNA antisense region (stab08)
  misc_feature (20)..(20): Phosphorothioate or Phosphorodithioate 3'-Internucleotide Linkage (optionally present)
  misc_feature (1)..(1): 2'-deoxy-2'Fluoro
  misc_feature (2)..(3): 2'-O-methyl
  misc_feature (4)..(4): 2'-deoxy-2'Fluoro
  misc_feature (5)..(5): 2'-O-methyl
  misc_feature (6)..(7): 2'-deoxy-2'Fluoro
  misc_feature (8)..(8): 2'-O-methyl
  misc_feature (9)..(9): 2'-deoxy-2'Fluoro
  misc_feature (10)..(13): 2'-O-methyl
  misc_feature (14)..(19): 2'-deoxy-2'Fluoro
  misc_feature (1)..(19): ribonucleotide unmodified or modified as described for this sequence
caguaccacaaggccuuuctt

SEQ ID NO: 1829 - DNA, 21 bp, Artificial Sequence
  Description of Artificial Sequence: Target Sequence/siNA antisense region (stab08)
  misc_feature (20)..(20): Phosphorothioate or Phosphorodithioate 3'-Internucleotide Linkage (optionally present)
  misc_feature (2)..(2): 2'-deoxy-2'Fluoro
  misc_feature (3)..(4): 2'-O-methyl
  misc_feature (5)..(5): 2'-deoxy-2'Fluoro
  misc_feature (6)..(6): 2'-O-methyl
  misc_feature (7)..(8): 2'-deoxy-2'Fluoro
  misc_feature (9)..(9): 2'-O-methyl
  misc_feature (10)..(10): 2'-deoxy-2'Fluoro
  misc_feature (11)..(14): 2'-O-methyl
  misc_feature (15)..(19): 2'-deoxy-2'Fluoro
  misc_feature (1)..(19): ribonucleotide unmodified or modified as described for this sequence
gcaguaccacaaggccuuutt

SEQ ID NO: 1830 - DNA, 21 bp, Artificial Sequence
  Description of Artificial Sequence: Target Sequence/siNA antisense region (stab08)
  misc_feature (20)..(20): Phosphorothioate or Phosphorodithioate 3'-Internucleotide Linkage (optionally present)
  misc_feature (3)..(3): 2'-deoxy-2'Fluoro
  misc_feature (4)..(5): 2'-O-methyl
  misc_feature (6)..(6): 2'-deoxy-2'Fluoro
  misc_feature (7)..(7): 2'-O-methyl
  misc_feature (8)..(9): 2'-deoxy-2'Fluoro
  misc_feature (10)..(10): 2'-O-methyl
  misc_feature (11)..(11): 2'-deoxy-2'Fluoro
  misc_feature (12)..(15): 2'-O-methyl
  misc_feature (16)..(19): 2'-deoxy-2'Fluoro
  misc_feature (1)..(19): ribonucleotide unmodified or modified as described for this sequence
ggcaguaccacaaggccuutt

SEQ ID NO: 1831 - DNA, 21 bp, Artificial Sequence
  Description of Artificial Sequence: Target Sequence/siNA antisense region (stab08)
  misc_feature (20)..(20): Phosphorothioate or Phosphorodithioate 3'-Internucleotide Linkage (optionally present)
  misc_feature (1)..(1): 2'-deoxy-2'Fluoro
  misc_feature (2)..(4): 2'-O-methyl
  misc_feature (5)..(5): 2'-deoxy-2'Fluoro
  misc_feature (6)..(7): 2'-O-methyl
  misc_feature (8)..(8): 2'-deoxy-2'Fluoro
  misc_feature (9)..(9): 2'-O-methyl
  misc_feature (10)..(11): 2'-deoxy-2'Fluoro
  misc_feature (12)..(12): 2'-O-methyl
  misc_feature (13)..(13): 2'-deoxy-2'Fluoro
  misc_feature (14)..(17): 2'-O-methyl
  misc_feature (18)..(19): 2'-deoxy-2'Fluoro
  misc_feature (1)..(19): ribonucleotide unmodified or modified as described for this sequence
caggcaguaccacaaggcctt

SEQ ID NO: 1832 - DNA, 21 bp, Artificial Sequence
  Description of Artificial Sequence: Target Sequence/siNA antisense region (stab08)
  misc_feature (20)..(20): Phosphorothioate or Phosphorodithioate 3'-Internucleotide Linkage (optionally present)
  misc_feature (1)..(2): 2'-deoxy-2'Fluoro
  misc_feature (3)..(5): 2'-O-methyl
  misc_feature (6)..(6): 2'-deoxy-2'Fluoro
  misc_feature (7)..(8): 2'-O-methyl
  misc_feature (9)..(9): 2'-deoxy-2'Fluoro
  misc_feature (10)..(10): 2'-O-methyl
  misc_feature (11)..(12): 2'-deoxy-2'Fluoro
  misc_feature (13)..(13): 2'-O-methyl
  misc_feature (14)..(14): 2'-deoxy-2'Fluoro
  misc_feature (15)..(18): 2'-O-methyl
  misc_feature (19)..(19): 2'-deoxy-2'Fluoro
  misc_feature (1)..(19): ribonucleotide unmodified or modified as described for this sequence
ucaggcaguaccacaaggctt

SEQ ID NO: 1833 - DNA, 21 bp, Artificial Sequence
  Description of Artificial Sequence: Target Sequence/siNA antisense region (stab08)
  misc_feature (20)..(20): Phosphorothioate or Phosphorodithioate 3'-Internucleotide Linkage (optionally present)
  misc_feature (2)..(3): 2'-deoxy-2'Fluoro
  misc_feature (4)..(6): 2'-O-methyl
  misc_feature (7)..(7): 2'-deoxy-2'Fluoro
  misc_feature (8)..(9): 2'-O-methyl
  misc_feature (10)..(10): 2'-deoxy-2'Fluoro
  misc_feature (11)..(11): 2'-O-methyl
  misc_feature (12)..(13): 2'-deoxy-2'Fluoro
  misc_feature (14)..(14): 2'-O-methyl
  misc_feature (15)..(15): 2'-deoxy-2'Fluoro
  misc_feature (16)..(19): 2'-O-methyl
  misc_feature (1)..(19): ribonucleotide unmodified or modified as described for this sequence
aucaggcaguaccacaaggtt

SEQ ID NO: 1834 - DNA, 21 bp, Artificial Sequence
  Description of Artificial Sequence: Target Sequence/siNA antisense region (stab08)
  misc_feature (20)..(20): Phosphorothioate or Phosphorodithioate 3'-Internucleotide Linkage (optionally present)
  misc_feature (4)..(4): 2'-deoxy-2'Fluoro
  misc_feature (5)..(5): 2'-O-methyl
  misc_feature (6)..(9): 2'-deoxy-2'Fluoro
  misc_feature (10)..(10): 2'-O-methyl
  misc_feature (11)..(12): 2'-deoxy-2'Fluoro
  misc_feature (13)..(15): 2'-O-methyl
  misc_feature (16)..(16): 2'-deoxy-2'Fluoro
  misc_feature (17)..(18): 2'-O-methyl
  misc_feature (19)..(19): 2'-deoxy-2'Fluoro
  misc_feature (1)..(19): ribonucleotide unmodified or modified as described for this sequence
aagcacccuaucaggcagutt

SEQ ID NO: 1835 - DNA, 21 bp, Artificial Sequence
  Description of Artificial Sequence: Target Sequence/siNA antisense region (stab08)
  misc_feature (20)..(20): Phosphorothioate or Phosphorodithioate 3'-Internucleotide Linkage (optionally present)
  misc_feature (1)..(1): 2'-deoxy-2'Fluoro
  misc_feature (2)..(2): 2'-O-methyl
  misc_feature (3)..(3): 2'-deoxy-2'Fluoro
  misc_feature (4)..(6): 2'-O-methyl
  misc_feature (7)..(7): 2'-deoxy-2'Fluoro
  misc_feature (8)..(8): 2'-O-methyl
  misc_feature (9)..(12): 2'-deoxy-2'Fluoro
  misc_feature (13)..(13): 2'-O-methyl
  misc_feature (14)..(15): 2'-deoxy-2'Fluoro
  misc_feature (16)..(18): 2'-O-methyl
  misc_feature (19)..(19): 2'-deoxy-2'Fluoro
  misc_feature (1)..(19): ribonucleotide unmodified or modified as described for this sequence
cgcaagcacccuaucaggctt

SEQ ID NO: 1836 - DNA, 21 bp, Artificial Sequence
  Description of Artificial Sequence: Target Sequence/siNA antisense region (stab08)
  misc_feature (20)..(20): Phosphorothioate or Phosphorodithioate 3'-Internucleotide Linkage (optionally present)
  misc_feature (1)..(3): 2'-deoxy-2'Fluoro
  misc_feature (4)..(4): 2'-O-methyl
  misc_feature (5)..(5): 2'-deoxy-2'Fluoro
  misc_feature (6)..(8): 2'-O-methyl
  misc_feature (9)..(9): 2'-deoxy-2'Fluoro
  misc_feature (10)..(10): 2'-O-methyl
  misc_feature (11)..(14): 2'-deoxy-2'Fluoro
  misc_feature (15)..(15): 2'-O-methyl
  misc_feature (16)..(17): 2'-deoxy-2'Fluoro
  misc_feature (18)..(19): 2'-O-methyl
  misc_feature (1)..(19): ribonucleotide unmodified or modified as described for this sequence
cucgcaagcacccuaucagtt

SEQ ID NO: 1837 - DNA, 21 bp, Artificial Sequence
  Description of Artificial Sequence: Target Sequence/siNA antisense region (stab08)
  misc_feature (20)..(20): Phosphorothioate or Phosphorodithioate 3'-Internucleotide Linkage (optionally present)
  misc_feature (2)..(4): 2'-deoxy-2'Fluoro
  misc_feature (5)..(5): 2'-O-methyl
  misc_feature (6)..(6): 2'-deoxy-2'Fluoro
  misc_feature (7)..(9): 2'-O-methyl
  misc_feature (10)..(10): 2'-deoxy-2'Fluoro
  misc_feature (11)..(11): 2'-O-methyl
  misc_feature (12)..(15): 2'-deoxy-2'Fluoro
  misc_feature (16)..(16): 2'-O-methyl
  misc_feature (17)..(18): 2'-deoxy-2'Fluoro
  misc_feature (19)..(19): 2'-O-methyl
  misc_feature (1)..(19): ribonucleotide unmodified or modified as described for this sequence
acucgcaagcacccuaucatt

SEQ ID NO: 1838 - DNA, 21 bp, Artificial Sequence
  Description of Artificial Sequence: Target Sequence/siNA antisense region (stab08)
  misc_feature (20)..(20): Phosphorothioate or Phosphorodithioate 3'-Internucleotide Linkage (optionally present)
  misc_feature (2)..(2): 2'-deoxy-2'Fluoro
  misc_feature (3)..(3): 2'-O-methyl
  misc_feature (4)..(6): 2'-deoxy-2'Fluoro
  misc_feature (7)..(7): 2'-O-methyl
  misc_feature (8)..(8): 2'-deoxy-2'Fluoro
  misc_feature (9)..(11): 2'-O-methyl
  misc_feature (12)..(12): 2'-deoxy-2'Fluoro
  misc_feature (13)..(13): 2'-O-methyl
  misc_feature (14)..(17): 2'-deoxy-2'Fluoro
  misc_feature (18)..(18): 2'-O-methyl
  misc_feature (19)..(19): 2'-deoxy-2'Fluoro
  misc_feature (1)..(19): ribonucleotide unmodified or modified as described for this sequence
gcacucgcaagcacccuautt

SEQ ID NO: 1839 - DNA, 21 bp, Artificial Sequence
  Description of Artificial Sequence: Target Sequence/siNA antisense region (stab08)
  misc_feature (20)..(20): Phosphorothioate or Phosphorodithioate 3'-Internucleotide Linkage (optionally present)
  misc_feature (3)..(3): 2'-deoxy-2'Fluoro
  misc_feature (4)..(4): 2'-O-methyl
  misc_feature (5)..(7): 2'-deoxy-2'Fluoro
  misc_feature (8)..(8): 2'-O-methyl
  misc_feature (9)..(9): 2'-deoxy-2'Fluoro
  misc_feature (10)..(12): 2'-O-methyl
  misc_feature (13)..(13): 2'-deoxy-2'Fluoro
  misc_feature (14)..(14): 2'-O-methyl
  misc_feature (15)..(18): 2'-deoxy-2'Fluoro
  misc_feature (19)..(19): 2'-O-methyl
  misc_feature (1)..(19): ribonucleotide unmodified or modified as described for this sequence
ggcacucgcaagcacccuatt

SEQ ID NO: 1840 - DNA, 21 bp, Artificial Sequence
  Description of Artificial Sequence: Target Sequence/siNA antisense region (stab08)
  misc_feature (20)..(20): Phosphorothioate or Phosphorodithioate 3'-Internucleotide Linkage (optionally present)
  misc_feature (5)..(5): 2'-deoxy-2'Fluoro
  misc_feature (6)..(6): 2'-O-methyl
  misc_feature (7)..(9): 2'-deoxy-2'Fluoro
  misc_feature (10)..(10): 2'-O-methyl
  misc_feature (11)..(11): 2'-deoxy-2'Fluoro
  misc_feature (12)..(14): 2'-O-methyl
  misc_feature (15)..(15): 2'-deoxy-2'Fluoro
  misc_feature (16)..(16): 2'-O-methyl
  misc_feature (17)..(19): 2'-deoxy-2'Fluoro
  misc_feature (1)..(19): ribonucleotide unmodified or modified as described for this sequence
ggggcacucgcaagcaccctt

SEQ ID NO: 1841 - DNA, 21 bp, Artificial Sequence
  Description of Artificial Sequence: Target Sequence/siNA antisense region (stab08)
  misc_feature (20)..(20): Phosphorothioate or Phosphorodithioate 3'-Internucleotide Linkage (optionally present)
  misc_feature (1)..(1): 2'-deoxy-2'Fluoro
  misc_feature (2)..(5): 2'-O-methyl
  misc_feature (6)..(6): 2'-deoxy-2'Fluoro
  misc_feature (7)..(7): 2'-O-methyl
  misc_feature (8)..(10): 2'-deoxy-2'Fluoro
  misc_feature (11)..(11): 2'-O-methyl
  misc_feature (12)..(12): 2'-deoxy-2'Fluoro
  misc_feature (13)..(15): 2'-O-methyl
  misc_feature (16)..(16): 2'-deoxy-2'Fluoro
  misc_feature (17)..(17): 2'-O-methyl
  misc_feature (18)..(19): 2'-deoxy-2'Fluoro
  misc_feature (1)..(19): ribonucleotide unmodified or modified as described for this sequence
cggggcacucgcaagcacctt

SEQ ID NO: 1842 - DNA, 21 bp, Artificial Sequence
  Description of Artificial Sequence: Target Sequence/siNA antisense region (stab08)
  misc_feature (20)..(20): Phosphorothioate or Phosphorodithioate 3'-Internucleotide Linkage (optionally present)
  misc_feature (1)..(4): 2'-deoxy-2'Fluoro
  misc_feature (5)..(8): 2'-O-methyl
  misc_feature (9)..(9): 2'-deoxy-2'Fluoro
  misc_feature (10)..(10): 2'-O-methyl
  misc_feature (11)..(13): 2'-deoxy-2'Fluoro
  misc_feature (14)..(14): 2'-O-methyl
  misc_feature (15)..(15): 2'-deoxy-2'Fluoro
  misc_feature (16)..(18): 2'-O-methyl
  misc_feature (19)..(19): 2'-deoxy-2'Fluoro
  misc_feature (1)..(19): ribonucleotide unmodified or modified as described for this sequence
ucccggggcacucgcaagctt

SEQ ID NO: 1843 - DNA, 21 bp, Artificial Sequence
  Description of Artificial Sequence: Target Sequence/siNA antisense region (stab08)
  misc_feature (20)..(20): Phosphorothioate or Phosphorodithioate 3'-Internucleotide Linkage (optionally present)
  misc_feature (1)..(5): 2'-deoxy-2'Fluoro
  misc_feature (6)..(9): 2'-O-methyl
  misc_feature (10)..(10): 2'-deoxy-2'Fluoro
  misc_feature (11)..(11): 2'-O-methyl
  misc_feature (12)..(14): 2'-deoxy-2'Fluoro
  misc_feature (15)..(15): 2'-O-methyl
  misc_feature (16)..(16): 2'-deoxy-2'Fluoro
  misc_feature (17)..(19): 2'-O-methyl
  misc_feature (1)..(19): ribonucleotide unmodified or modified as described for this sequence
cucccggggcacucgcaagtt

SEQ ID NO: 1844 - DNA, 21 bp, Artificial Sequence
  Description of Artificial Sequence: Target Sequence/siNA antisense region (stab08)
  misc_feature (20)..(20): Phosphorothioate or Phosphorodithioate 3'-Internucleotide Linkage (optionally present)
  misc_feature (1)..(6): 2'-deoxy-2'Fluoro
  misc_feature (7)..(10): 2'-O-methyl
  misc_feature (11)..(11): 2'-deoxy-2'Fluoro
  misc_feature (12)..(12): 2'-O-methyl
  misc_feature (13)..(15): 2'-deoxy-2'Fluoro
  misc_feature (16)..(16): 2'-O-methyl
  misc_feature (17)..(17): 2'-deoxy-2'Fluoro
  misc_feature (18)..(19): 2'-O-methyl
  misc_feature (1)..(19): ribonucleotide unmodified or modified as described for this sequence
ccucccggggcacucgcaatt

SEQ ID NO: 1845 - DNA, 21 bp, Artificial Sequence
  Description of Artificial Sequence: Target Sequence/siNA antisense region (stab08)
  misc_feature (20)..(20): Phosphorothioate or Phosphorodithioate 3'-Internucleotide Linkage (optionally present)
  misc_feature (2)..(7): 2'-deoxy-2'Fluoro
  misc_feature (8)..(11): 2'-O-methyl
  misc_feature (12)..(12): 2'-deoxy-2'Fluoro
  misc_feature (13)..(13): 2'-O-methyl
  misc_feature (14)..(16): 2'-deoxy-2'Fluoro
  misc_feature (17)..(17): 2'-O-methyl
  misc_feature (18)..(18): 2'-deoxy-2'Fluoro
  misc_feature (19)..(19): 2'-O-methyl
  misc_feature (1)..(19): ribonucleotide unmodified or modified as described for this sequence
accucccggggcacucgcatt

SEQ ID NO: 1846 - DNA, 21 bp, Artificial Sequence
  Description of Artificial Sequence: Target Sequence/siNA antisense region (stab08)
  misc_feature (20)..(20): Phosphorothioate or Phosphorodithioate 3'-Internucleotide Linkage (optionally present)
  misc_feature (3)..(8): 2'-deoxy-2'Fluoro
  misc_feature (9)..(12): 2'-O-methyl
  misc_feature (13)..(13): 2'-deoxy-2'Fluoro
  misc_feature (14)..(14): 2'-O-methyl
  misc_feature (15)..(17): 2'-deoxy-2'Fluoro
  misc_feature (18)..(18): 2'-O-methyl
  misc_feature (19)..(19): 2'-deoxy-2'Fluoro
  misc_feature (1)..(19): ribonucleotide unmodified or modified as described for this sequence
gaccucccggggcacucgctt

SEQ ID NO: 1847 - DNA, 21 bp, Artificial Sequence
  Description of Artificial Sequence: Target Sequence/siNA antisense region (stab08)
  misc_feature (20)..(20): Phosphorothioate or Phosphorodithioate 3'-Internucleotide Linkage (optionally present)
  misc_feature (4)..(9): 2'-deoxy-2'Fluoro
  misc_feature (10)..(13): 2'-O-methyl
  misc_feature (14)..(14): 2'-deoxy-2'Fluoro
  misc_feature (15)..(15): 2'-O-methyl
  misc_feature (16)..(18): 2'-deoxy-2'Fluoro
  misc_feature (19)..(19): 2'-O-methyl
  misc_feature (1)..(19): ribonucleotide unmodified or modified as described for this sequence
agaccucccggggcacucgtt

SEQ ID NO: 1848 - DNA, 21 bp, Artificial Sequence
  Description of Artificial Sequence: Target Sequence/siNA antisense region (stab08)
  misc_feature (20)..(20): Phosphorothioate or Phosphorodithioate 3'-Internucleotide Linkage (optionally present)
  misc_feature (5)..(10): 2'-deoxy-2'Fluoro
  misc_feature (11)..(14): 2'-O-methyl
  misc_feature (15)..(15): 2'-deoxy-2'Fluoro
  misc_feature (16)..(16): 2'-O-methyl
  misc_feature (17)..(19): 2'-deoxy-2'Fluoro
  misc_feature (1)..(19): ribonucleotide unmodified or modified as described for this sequence
gagaccucccggggcacuctt

SEQ ID NO: 1849 - DNA, 21 bp, Artificial Sequence
  Description of Artificial Sequence: Target Sequence/siNA antisense region (stab08)
  misc_feature (20)..(20): Phosphorothioate or Phosphorodithioate 3'-Internucleotide Linkage (optionally present)
  misc_feature (2)..(2): 2'-deoxy-2'Fluoro
  misc_feature (3)..(6): 2'-O-methyl
  misc_feature (7)..(12): 2'-deoxy-2'Fluoro
  misc_feature (13)..(16): 2'-O-methyl
  misc_feature (17)..(17): 2'-deoxy-2'Fluoro
  misc_feature (18)..(18): 2'-O-methyl
  misc_feature (19)..(19): 2'-deoxy-2'Fluoro
  misc_feature (1)..(19): ribonucleotide unmodified or modified as described for this sequence
acgagaccucccggggcactt

SEQ ID NO: 1850 - DNA, 21 bp, Artificial Sequence
  Description of Artificial Sequence: Target Sequence/siNA antisense region (stab08)
  misc_feature (20)..(20): Phosphorothioate or Phosphorodithioate 3'-Internucleotide Linkage (optionally present)
  misc_feature (1)..(1): 2'-deoxy-2'Fluoro
  misc_feature (2)..(2): 2'-O-methyl
  misc_feature (3)..(3): 2'-deoxy-2'Fluoro
  misc_feature (4)..(7): 2'-O-methyl
  misc_feature (8)..(13): 2'-deoxy-2'Fluoro
  misc_feature (14)..(17): 2'-O-methyl
  misc_feature (18)..(18): 2'-deoxy-2'Fluoro
  misc_feature (19)..(19): 2'-O-methyl
  misc_feature (1)..(19): ribonucleotide unmodified or modified as described for this sequence
uacgagaccucccggggcatt

SEQ ID NO: 1851 - DNA, 21 bp, Artificial Sequence
  Description of Artificial Sequence: Target Sequence/siNA antisense region (stab08)
  misc_feature (20)..(20): Phosphorothioate or Phosphorodithioate 3'-Internucleotide Linkage (optionally present)
  misc_feature (1)..(1): 2'-deoxy-2'Fluoro
  misc_feature (2)..(2): 2'-O-methyl
  misc_feature (3)..(3): 2'-deoxy-2'Fluoro
  misc_feature (4)..(5): 2'-O-methyl
  misc_feature (6)..(8): 2'-deoxy-2'Fluoro
  misc_feature (9)..(9): 2'-O-methyl
  misc_feature (10)..(10): 2'-deoxy-2'Fluoro
  misc_feature (11)..(14): 2'-O-methyl
  misc_feature (15)..(19): 2'-deoxy-2'Fluoro
  misc_feature (1)..(19): ribonucleotide unmodified or modified as described for this sequence
cacggucuacgagaccucctt

SEQ ID NO: 1852 - DNA, 21 bp, Artificial Sequence
  Description of Artificial Sequence: Target Sequence/siNA antisense region (stab08)
  misc_feature (20)..(20): Phosphorothioate or Phosphorodithioate 3'-Internucleotide Linkage (optionally present)
  misc_feature (1)..(1): Terminal 5' phosphate
  misc_feature (1)..(2): 2'-deoxy-2'Fluoro
  misc_feature (3)..(3): 2'-O-methyl
  misc_feature (4)..(4): 2'-deoxy-2'Fluoro
  misc_feature (5)..(7): 2'-O-methyl
  misc_feature (8)..(8): 2'-deoxy-2'Fluoro
  misc_feature (9)..(9): 2'-O-methyl
  misc_feature (10)..(13): 2'-deoxy-2'Fluoro
  misc_feature (14)..(14): 2'-O-methyl
  misc_feature (15)..(16): 2'-deoxy-2'Fluoro
  misc_feature (17)..(19): 2'-O-methyl
  misc_feature (1)..(19): ribonucleotide unmodified or modified as described for this sequence
ucgcaagcacccuaucaggtt

SEQ ID NO: 1853 - DNA, 21 bp, Artificial Sequence
  Description of Artificial Sequence: Target Sequence/siNA antisense region (stab05)
  misc_feature (20)..(20): Phosphorothioate or Phosphorodithioate 3'-Internucleotide Linkage (optionally present)
  misc_feature (1)..(1): Terminal 5' phosphate
  misc_feature (1)..(2): 2'-deoxy-2'Fluoro
  misc_feature (4)..(4): 2'-deoxy-2'Fluoro
  misc_feature (8)..(8): 2'-deoxy-2'Fluoro
  misc_feature (10)..(13): 2'-deoxy-2'Fluoro
  misc_feature (15)..(16): 2'-deoxy-2'Fluoro
  misc_feature (1)..(19): ribonucleotide unmodified or modified as described for this sequence
ucgcaagcacccuaucaggtt

SEQ ID NO: 1854 - DNA, 21 bp, Artificial Sequence
  Description of Artificial Sequence: Target Sequence/siNA antisense region (stab05)
  misc_feature (20)..(20): Phosphorothioate or Phosphorodithioate 3'-Internucleotide Linkage (optionally present)
  misc_feature (1)..(1): Terminal 5' phosphate
  misc_feature (2)..(5): 2'-deoxy-2'Fluoro
  misc_feature (7)..(8): 2'-deoxy-2'Fluoro
  misc_feature (12)..(12): 2'-deoxy-2'Fluoro
  misc_feature (15)..(15): 2'-deoxy-2'Fluoro
  misc_feature (17)..(18): 2'-deoxy-2'Fluoro
  misc_feature (1)..(19): ribonucleotide unmodified or modified as described for this sequence
acccuaucaggcaguaccatt

SEQ ID NO: 1855 - DNA, 21 bp, Artificial Sequence
  Description of Artificial Sequence: Target Sequence/siNA antisense region (stab08)
  misc_feature (20)..(20): Phosphorothioate or Phosphorodithioate 3'-Internucleotide Linkage (optionally present)
  misc_feature (1)..(1): Terminal 5' phosphate
  misc_feature (1)..(1): 2'-O-methyl
  misc_feature (2)..(5): 2'-deoxy-2'Fluoro
  misc_feature (6)..(6): 2'-O-methyl
  misc_feature (7)..(8): 2'-deoxy-2'Fluoro
  misc_feature (9)..(11): 2'-O-methyl
  misc_feature (12)..(12): 2'-deoxy-2'Fluoro
  misc_feature (13)..(14): 2'-O-methyl
  misc_feature (15)..(15): 2'-deoxy-2'Fluoro
  misc_feature (16)..(16): 2'-O-methyl
  misc_feature (17)..(18): 2'-deoxy-2'Fluoro
  misc_feature (19)..(19): 2'-O-methyl
  misc_feature (1)..(19): ribonucleotide unmodified or modified as described for this sequence
acccuaucaggcaguaccatt

SEQ ID NO: 1856 - DNA, 21 bp, Artificial Sequence
  Description of Artificial Sequence: Target Sequence/siNA antisense region (stab08)
  misc_feature (20)..(20): Phosphorothioate or Phosphorodithioate 3'-Internucleotide Linkage (optionally present)
  misc_feature (1)..(1): Terminal 5' phosphate
  misc_feature (1)..(1): 2'-deoxy-2'Fluoro
  misc_feature (2)..(2): 2'-O-methyl
  misc_feature (3)..(5): 2'-deoxy-2'Fluoro
  misc_feature (6)..(6): 2'-O-methyl
  misc_feature (7)..(7): 2'-deoxy-2'Fluoro
  misc_feature (8)..(10): 2'-O-methyl
  misc_feature (11)..(11): 2'-deoxy-2'Fluoro
  misc_feature (12)..(12): 2'-O-methyl
  misc_feature (13)..(16): 2'-deoxy-2'Fluoro
  misc_feature (17)..(17): 2'-O-methyl
  misc_feature (18)..(19): 2'-deoxy-2'Fluoro
  misc_feature (1)..(19): ribonucleotide unmodified or modified as described for this sequence
cacucgcaagcacccuauctt

SEQ ID NO: 1857 - DNA, 21 bp, Artificial Sequence
  Description of Artificial Sequence: Target Sequence/siNA antisense region (stab08)
  misc_feature (20)..(20): Phosphorothioate or Phosphorodithioate 3'-Internucleotide Linkage (optionally present)
  misc_feature (1)..(1): Terminal 5' phosphate
  misc_feature (1)..(2): 2'-O-methyl
  misc_feature (3)..(5): 2'-deoxy-2'Fluoro
  misc_feature (6)..(6): 2'-O-methyl
  misc_feature (7)..(7): 2'-deoxy-2'Fluoro
  misc_feature (8)..(11): 2'-O-methyl
  misc_feature (12)..(17): 2'-deoxy-2'Fluoro
  misc_feature (18)..(19): 2'-O-methyl
  misc_feature (1)..(19): ribonucleotide unmodified or modified as described for this sequence
ggucuacgagaccucccggtt

SEQ ID NO: 1858 - DNA, 21 bp, Artificial Sequence
  Description of Artificial Sequence: Target Sequence/siNA antisense region (stab08)
  misc_feature (20)..(20): Phosphorothioate or Phosphorodithioate 3'-Internucleotide Linkage (optionally present)
  misc_feature (0)..(0): hexethelyne glycol spacer (language)
  misc_feature (1)..(2): 2'-deoxy-2'Fluoro
  misc_feature (3)..(3): 2'-O-methyl
  misc_feature (4)..(4): 2'-deoxy-2'Fluoro
  misc_feature (5)..(7): 2'-O-methyl
  misc_feature (8)..(8): 2'-deoxy-2'Fluoro
  misc_feature (9)..(9): 2'-O-methyl
  misc_feature (10)..(13): 2'-deoxy-2'Fluoro
  misc_feature (14)..(14): 2'-O-methyl
  misc_feature (15)..(16): 2'-deoxy-2'Fluoro
  misc_feature (17)..(19): 2'-O-methyl
  misc_feature (1)..(19): ribonucleotide unmodified or modified as described for this sequence
ucgcaagcacccuaucaggtt

SEQ ID NO: 1859 - DNA, 21 bp, Artificial Sequence
  Description of Artificial Sequence: Target Sequence/siNA antisense region (stab05)
  misc_feature (20)..(20): Phosphorothioate or Phosphorodithioate 3'-Internucleotide Linkage (optionally present)
  misc_feature (0)..(0): hexethelyne glycol spacer (language)
  misc_feature (1)..(2): 2'-deoxy-2'Fluoro
  misc_feature (4)..(4): 2'-deoxy-2'Fluoro
  misc_feature (8)..(8): 2'-deoxy-2'Fluoro
  misc_feature (10)..(13): 2'-deoxy-2'Fluoro
  misc_feature (15)..(16): 2'-deoxy-2'Fluoro
  misc_feature (1)..(19): ribonucleotide unmodified or modified as described for this sequence
ucgcaagcacccuaucaggtt

SEQ ID NO: 1860 - DNA, 21 bp, Artificial Sequence
  Description of Artificial Sequence: Target Sequence/siNA antisense region (stab05)
  misc_feature (20)..(20): Phosphorothioate or Phosphorodithioate 3'-Internucleotide Linkage (optionally present)
  misc_feature (0)..(0): hexethelyne glycol spacer (language)
  misc_feature (2)..(5): 2'-deoxy-2'Fluoro
  misc_feature (7)..(8): 2'-deoxy-2'Fluoro
  misc_feature (12)..(12): 2'-deoxy-2'Fluoro
  misc_feature (15)..(15): 2'-deoxy-2'Fluoro
  misc_feature (17)..(18): 2'-deoxy-2'Fluoro
  misc_feature (1)..(19): ribonucleotide unmodified or modified as described for this sequence
acccuaucaggcaguaccatt

SEQ ID NO: 1861 - DNA, 21 bp, Artificial Sequence
  Description of Artificial Sequence: Target Sequence/siNA antisense region (stab08)
  misc_feature (20)..(20): Phosphorothioate or Phosphorodithioate 3'-Internucleotide Linkage (optionally present)
  misc_feature (0)..(0): hexethelyne glycol spacer (language)
  misc_feature (1)..(1): 2'-O-methyl
  misc_feature (2)..(5): 2'-deoxy-2'Fluoro
  misc_feature (6)..(6): 2'-O-methyl
  misc_feature (7)..(8): 2'-deoxy-2'Fluoro
  misc_feature (9)..(11): 2'-O-methyl
  misc_feature (12)..(12): 2'-deoxy-2'Fluoro
  misc_feature (13)..(14): 2'-O-methyl
  misc_feature (15)..(15): 2'-deoxy-2'Fluoro
  misc_feature (16)..(16): 2'-O-methyl
  misc_feature (17)..(18): 2'-deoxy-2'Fluoro
  misc_feature (19)..(19): 2'-O-methyl
  misc_feature (1)..(19): ribonucleotide unmodified or modified as described for this sequence
acccuaucaggcaguaccatt

SEQ ID NO: 1862 - DNA, 21 bp, Artificial Sequence
  Description of Artificial Sequence: Target Sequence/siNA antisense region (stab08)
  misc_feature (20)..(20): Phosphorothioate or Phosphorodithioate 3'-Internucleotide Linkage (optionally present)
  misc_feature (0)..(0): hexethelyne glycol spacer (language)
  misc_feature (1)..(1): 2'-deoxy-2'Fluoro
  misc_feature (2)..(2): 2'-O-methyl
  misc_feature (3)..(5): 2'-deoxy-2'Fluoro
  misc_feature (6)..(6): 2'-O-methyl
  misc_feature (7)..(7): 2'-deoxy-2'Fluoro
  misc_feature (8)..(10): 2'-O-methyl
  misc_feature (11)..(11): 2'-deoxy-2'Fluoro
  misc_feature (12)..(12): 2'-O-methyl
  misc_feature (13)..(16): 2'-deoxy-2'Fluoro
  misc_feature (17)..(17): 2'-O-methyl
  misc_feature (18)..(19): 2'-deoxy-2'Fluoro
  misc_feature (1)..(19): ribonucleotide unmodified or modified as described for this sequence
cacucgcaagcacccuauctt

SEQ ID NO: 1863 - DNA, 21 bp, Artificial Sequence
  Description of Artificial Sequence: Target Sequence/siNA antisense region (stab08)
  misc_feature (20)..(20): Phosphorothioate or Phosphorodithioate 3'-Internucleotide Linkage (optionally present)
  misc_feature (0)..(0): hexethelyne glycol spacer (language)
  misc_feature (1)..(2): 2'-O-methyl
  misc_feature (3)..(5): 2'-deoxy-2'Fluoro
  misc_feature (6)..(6): 2'-O-methyl
  misc_feature (7)..(7): 2'-deoxy-2'Fluoro
  misc_feature (8)..(11): 2'-O-methyl
  misc_feature (12)..(17): 2'-deoxy-2'Fluoro
  misc_feature (18)..(19): 2'-O-methyl
  misc_feature (1)..(19): ribonucleotide unmodified or modified as described for this sequence
ggucuacgagaccucccggtt

SEQ ID NO: 1864 - DNA, 21 bp, Artificial Sequence
  Description of Artificial Sequence: Target Sequence/siNA sense region (stab07)
  misc_feature (1)..(1): 5'-3 attached terminal deoxyabasic moiety, inverted abasic, inverted nucleotide or other terminal cap that is optionally present
  misc_feature (21)..(21): 3'-3 attached terminal deoxyabasic moiety, inverted abasic, inverted nucleotide or other terminal cap that is optionally present
  misc_feature (1)..(2): 2'-deoxy-2'Fluoro
  misc_feature (9)..(10): 2'-deoxy-2'Fluoro
  misc_feature (12)..(12): 2'-deoxy-2'Fluoro
  misc_feature (14)..(14): 2'-deoxy-2'Fluoro
  misc_feature (17)..(19): 2'-deoxy-2'Fluoro
  misc_feature (1)..(19): ribonucleotide unmodified or modified as described for this sequence
ccgagaggucgcguagucctt

SEQ ID NO: 1865 - DNA, 21 bp, Artificial Sequence
  Description of Artificial Sequence: Target Sequence/siNA sense region (stab07)
  misc_feature (1)..(1): 5'-3 attached terminal deoxyabasic moiety, inverted abasic, inverted nucleotide or other terminal cap that is optionally present
  misc_feature (21)..(21): 3'-3 attached terminal deoxyabasic moiety, inverted abasic, inverted nucleotide or other terminal cap that is optionally present
  misc_feature (1)..(2): 2'-deoxy-2'Fluoro
  misc_feature (9)..(10): 2'-deoxy-2'Fluoro
  misc_feature (12)..(12): 2'-deoxy-2'Fluoro
  misc_feature (14)..(15): 2'-deoxy-2'Fluoro
  misc_feature (18)..(19): 2'-deoxy-2'Fluoro
  misc_feature (1)..(19): ribonucleotide unmodified or modified as described for this sequence
ccgagaggucgcgucgauctt

SEQ ID NO: 1866 - DNA, 21 bp, Artificial Sequence
  Description of Artificial Sequence: Target Sequence/siNA sense region (stab07)
  misc_feature (1)..(1): 5'-3 attached terminal deoxyabasic moiety, inverted abasic, inverted nucleotide or other terminal cap that is optionally present
  misc_feature (21)..(21): 3'-3 attached terminal deoxyabasic moiety, inverted abasic, inverted nucleotide or other terminal cap that is optionally present
  misc_feature (1)..(2): 2'-deoxy-2'Fluoro
  misc_feature (5)..(5): 2'-deoxy-2'Fluoro
  misc_feature (9)..(12): 2'-deoxy-2'Fluoro
  misc_feature (14)..(14): 2'-deoxy-2'Fluoro
  misc_feature (18)..(18): 2'-deoxy-2'Fluoro
  misc_feature (1)..(19): ribonucleotide unmodified or modified as described for this sequence
ccgguaggucccguggacatt

SEQ ID NO: 1867 - DNA, 21 bp, Artificial Sequence
  Description of Artificial Sequence: Target Sequence/siNA antisense region (stab08)
  misc_feature (20)..(20): Phosphorothioate or Phosphorodithioate 3'-Internucleotide Linkage (optionally present)
  misc_feature (4)..(5): 2'-deoxy-2'Fluoro
  misc_feature (6)..(6): 2'-O-methyl
  misc_feature (7)..(7): 2'-deoxy-2'Fluoro
  misc_feature (8)..(8): 2'-O-methyl
  misc_feature (9)..(9): 2'-deoxy-2'Fluoro
  misc_feature (10)..(11): 2'-O-methyl
  misc_feature (12)..(17): 2'-deoxy-2'Fluoro
  misc_feature (18)..(19): 2'-O-methyl
  misc_feature (1)..(19): ribonucleotide unmodified or modified as described for this sequence
ggacuacgcgaccucucggtt

SEQ ID NO: 1868 - DNA, 21 bp, Artificial Sequence
  Description of Artificial Sequence: Target Sequence/siNA antisense region (stab08)
  misc_feature (20)..(20): Phosphorothioate or Phosphorodithioate 3'-Internucleotide Linkage (optionally present)
  misc_feature (3)..(4): 2'-deoxy-2'Fluoro
  misc_feature (5)..(6): 2'-O-methyl
  misc_feature (7)..(7): 2'-deoxy-2'Fluoro
  misc_feature (8)..(8): 2'-O-methyl
  misc_feature (9)..(9): 2'-deoxy-2'Fluoro
  misc_feature (10)..(11): 2'-O-methyl
  misc_feature (12)..(17): 2'-deoxy-2'Fluoro
  misc_feature (18)..(19): 2'-O-methyl
  misc_feature (1)..(19): ribonucleotide unmodified or modified as described for this sequence
gaucgacgcgaccucucggtt

SEQ ID NO: 1869 - DNA, 21 bp, Artificial Sequence
  Description of Artificial Sequence: Target Sequence/siNA antisense region (stab08)
  misc_feature (20)..(20): Phosphorothioate or Phosphorodithioate 3'-Internucleotide Linkage (optionally present)
  misc_feature (1)..(1): 2'-deoxy-2'Fluoro
  misc_feature (2)..(2): 2'-O-methyl
  misc_feature (3)..(5): 2'-deoxy-2'Fluoro
  misc_feature (6)..(6): 2'-O-methyl
  misc_feature (7)..(7): 2'-deoxy-2'Fluoro
  misc_feature (8)..(11): 2'-O-methyl
  misc_feature (12)..(14): 2'-deoxy-2'Fluoro
  misc_feature (15)..(15): 2'-O-methyl
  misc_feature (16)..(17): 2'-deoxy-2'Fluoro
  misc_feature (18)..(19): 2'-O-methyl
  misc_feature (1)..(19): ribonucleotide unmodified or modified as described for this sequence
uguccacgggaccuaccggtt

SEQ ID NO: 1870 - DNA, 21 bp, Artificial Sequence
  Description of Artificial Sequence: Target Sequence/siNA sense region (stab07)
  misc_feature (1)..(1): 5'-3 attached terminal deoxyabasic moiety, inverted abasic, inverted nucleotide or other terminal cap that is optionally present
  misc_feature (21)..(21): 3'-3 attached terminal deoxyabasic moiety, inverted abasic, inverted nucleotide or other terminal cap that is optionally present
  misc_feature (1)..(1): 2'-deoxy
  misc_feature (2)..(3): 2'-deoxy-2'Fluoro
  misc_feature (4)..(8): 2'-deoxy
  misc_feature (9)..(9): 2'-deoxy-2'Fluoro
  misc_feature (10)..(10): 2'-deoxy
  misc_feature (11)..(12): 2'-deoxy-2'Fluoro
  misc_feature (13)..(13): 2'-deoxy
  misc_feature (14)..(14): 2'-deoxy-2'Fluoro
  misc_feature (15)..(16): 2'-deoxy
  misc_feature (17)..(17): 2'-deoxy-2'Fluoro
  misc_feature (18)..(18): 2'-deoxy
  misc_feature (19)..(19): 2'-deoxy-2'Fluoro
  misc_feature (1)..(19): ribonucleotide unmodified or modified as described for this sequence
gcuaaaggcguuguggcactt

SEQ ID NO: 1871 - DNA, 21 bp, Artificial Sequence
  Description of Artificial Sequence: Target Sequence/siNA sense region (stab07)
  misc_feature (1)..(1): 5'-3 attached terminal deoxyabasic moiety, inverted abasic, inverted nucleotide or other terminal cap that is optionally present
  misc_feature (21)..(21): 3'-3 attached terminal deoxyabasic moiety, inverted abasic, inverted nucleotide or other terminal cap that is optionally present
  misc_feature (1)..(1): 2'-deoxy
  misc_feature (2)..(2): 2'-deoxy-2'Fluoro
  misc_feature (3)..(3): 2'-deoxy
  misc_feature (4)..(4): 2'-deoxy-2'Fluoro
  misc_feature (5)..(8): 2'-deoxy
  misc_feature (9)..(12): 2'-deoxy-2'Fluoro
  misc_feature (13)..(13): 2'-deoxy
  misc_feature (14)..(14): 2'-deoxy-2'Fluoro
  misc_feature (15)..(16): 2'-deoxy
  misc_feature (17)..(17): 2'-deoxy-2'Fluoro
  misc_feature (18)..(19): 2'-deoxy
  misc_feature (1)..(19): ribonucleotide unmodified or modified as described for this sequence
gcguaaggcccugugguaatt

SEQ ID NO: 1872 - DNA, 21 bp, Artificial Sequence
  Description of Artificial Sequence: Target Sequence/siNA sense region (stab07)
  misc_feature (1)..(1): 5'-3 attached terminal deoxyabasic moiety, inverted abasic, inverted nucleotide or other terminal cap that is optionally present
  misc_feature (21)..(21): 3'-3 attached terminal deoxyabasic moiety, inverted abasic, inverted nucleotide or other terminal cap that is optionally present
  misc_feature (1)..(6): 2'-deoxy
  misc_feature (7)..(7): 2'-deoxy-2'Fluoro
  misc_feature (8)..(8): 2'-deoxy
  misc_feature (9)..(11): 2'-deoxy-2'Fluoro
  misc_feature (12)..(13): 2'-deoxy
  misc_feature (14)..(14): 2'-deoxy-2'Fluoro
  misc_feature (15)..(16): 2'-deoxy
  misc_feature (17)..(19): 2'-deoxy-2'Fluoro
  misc_feature (1)..(19): ribonucleotide unmodified or modified as described for this sequence
gagaaacgccuggugguuctt

SEQ ID NO: 1873 - DNA, 21 bp, Artificial Sequence
  Description of Artificial Sequence: Target Sequence/siNA sense region (stab07)
  misc_feature (1)..(1): 5'-3 attached terminal deoxyabasic moiety, inverted abasic, inverted nucleotide or other terminal cap that is optionally present
  misc_feature (21)..(21): 3'-3 attached terminal deoxyabasic moiety, inverted abasic, inverted nucleotide or other terminal cap that is optionally present
  misc_feature (1)..(1): 2'-deoxy-2'Fluoro
  misc_feature (2)..(2): 2'-deoxy
  misc_feature (3)..(3): 2'-deoxy-2'Fluoro
  misc_feature (4)..(7): 2'-deoxy
  misc_feature (8)..(8): 2'-deoxy-2'Fluoro
  misc_feature (9)..(9): 2'-deoxy
  misc_feature (10)..(11): 2'-deoxy-2'Fluoro
  misc_feature (12)..(12): 2'-deoxy
  misc_feature (13)..(13): 2'-deoxy-2'Fluoro
  misc_feature (14)..(15): 2'-deoxy
  misc_feature (16)..(16): 2'-deoxy-2'Fluoro
  misc_feature (17)..(17): 2'-deoxy
  misc_feature (18)..(19): 2'-deoxy-2'Fluoro
  misc_feature (1)..(19): ribonucleotide unmodified or modified as described for this sequence
cguaaggcauuguggcacutt

SEQ ID NO: 1874 - DNA, 21 bp, Artificial Sequence
  Description of Artificial Sequence: Target Sequence/siNA sense region (stab07)
  misc_feature (1)..(1): 5'-3 attached terminal deoxyabasic moiety, inverted abasic, inverted nucleotide or other terminal cap that is optionally present
  misc_feature (21)..(21): 3'-3 attached terminal deoxyabasic moiety, inverted abasic, inverted nucleotide or other terminal cap that is optionally present
  misc_feature (1)..(1): 2'-deoxy-2'Fluoro
  misc_feature (2)..(7): 2'-deoxy
  misc_feature (8)..(8): 2'-deoxy-2'Fluoro
  misc_feature (9)..(9): 2'-deoxy
  misc_feature (10)..(11): 2'-deoxy-2'Fluoro
  misc_feature (12)..(12): 2'-deoxy
  misc_feature (13)..(13): 2'-deoxy-2'Fluoro
  misc_feature (14)..(14): 2'-deoxy
  misc_feature (15)..(16): 2'-deoxy-2'Fluoro
  misc_feature (17)..(17): 2'-deoxy
  misc_feature (18)..(19): 2'-deoxy-2'Fluoro
  misc_feature (1)..(19): ribonucleotide unmodified or modified as described for this sequence
cgagaggcauugugcuacutt

SEQ ID NO: 1875 - DNA, 21 bp, Artificial Sequence
  Description of Artificial Sequence: Target Sequence/siNA sense region (stab07)
  misc_feature (1)..(1): 5'-3 attached terminal deoxyabasic moiety, inverted abasic, inverted nucleotide or other terminal cap that is optionally present
  misc_feature (21)..(21): 3'-3 attached terminal deoxyabasic moiety, inverted abasic, inverted nucleotide or other terminal cap that is optionally present
  misc_feature (1)..(2): 2'-deoxy-2'Fluoro
  misc_feature (3)..(7): 2'-deoxy
  misc_feature (8)..(11): 2'-deoxy-2'Fluoro
  misc_feature (12)..(15): 2'-deoxy
  misc_feature (16)..(16): 2'-deoxy-2'Fluoro
  misc_feature (17)..(17): 2'-deoxy
  misc_feature (18)..(19): 2'-deoxy-2'Fluoro
  misc_feature (1)..(19): ribonucleotide unmodified or modified as described for this sequence
ccaaaggucuugaggugcutt

SEQ ID NO: 1876 - DNA, 21 bp, Artificial Sequence
  Description of Artificial Sequence: Target Sequence/siNA sense region (stab07)
  misc_feature (1)..(1): 5'-3 attached terminal deoxyabasic moiety, inverted abasic, inverted nucleotide or other terminal cap that is optionally present
  misc_feature (21)..(21): 3'-3 attached terminal deoxyabasic moiety, inverted abasic, inverted nucleotide or other terminal cap that is optionally present
  misc_feature (1)..(1): 2'-deoxy-2'Fluoro
  misc_feature (2)..(4): 2'-deoxy
  misc_feature (5)..(5): 2'-deoxy-2'Fluoro
  misc_feature (6)..(8): 2'-deoxy
  misc_feature (9)..(10): 2'-deoxy-2'Fluoro
  misc_feature (11)..(11): 2'-deoxy
  misc_feature (12)..(14): 2'-deoxy-2'Fluoro
  misc_feature (15)..(15): 2'-deoxy
  misc_feature (16)..(16): 2'-deoxy-2'Fluoro
  misc_feature (17)..(19): 2'-deoxy
  misc_feature (1)..(19): ribonucleotide unmodified or modified as described for this sequence
cggauaggcugcuugugagtt

SEQ ID NO: 1877 - DNA, 21 bp, Artificial Sequence
  Description of Artificial Sequence: Target Sequence/siNA sense region (stab07)
  misc_feature (1)..(1): 5'-3 attached terminal deoxyabasic moiety, inverted abasic, inverted nucleotide or other terminal cap that is optionally present
  misc_feature (21)..(21): 3'-3 attached terminal deoxyabasic moiety, inverted abasic, inverted nucleotide or other terminal cap that is optionally present
  misc_feature (1)..(2): 2'-deoxy-2'Fluoro
  misc_feature (3)..(3): 2'-deoxy
  misc_feature (4)..(5): 2'-deoxy-2'Fluoro
  misc_feature (6)..(9): 2'-deoxy
  misc_feature (10)..(10): 2'-deoxy-2'Fluoro
  misc_feature (11)..(11): 2'-deoxy
  misc_feature (12)..(14): 2'-deoxy-2'Fluoro
  misc_feature (15)..(19): 2'-deoxy
  misc_feature (1)..(19): ribonucleotide unmodified or modified as described for this sequence
cugcuaggguacuugggagtt

SEQ ID NO: 1878 - DNA, 21 bp, Artificial Sequence
  Description of Artificial Sequence: Target Sequence/siNA sense region (stab07)
  misc_feature (1)..(1): 5'-3 attached terminal deoxyabasic moiety, inverted abasic, inverted nucleotide or other terminal cap that is optionally present
  misc_feature (21)..(21): 3'-3 attached terminal deoxyabasic moiety, inverted abasic, inverted nucleotide or other terminal cap that is optionally present
  misc_feature (1)..(2): 2'-deoxy-2'Fluoro
  misc_feature (3)..(4): 2'-deoxy
  misc_feature (5)..(5): 2'-deoxy-2'Fluoro
  misc_feature (6)..(6): 2'-deoxy
  misc_feature (7)..(7): 2'-deoxy-2'Fluoro
  misc_feature (8)..(9): 2'-deoxy
  misc_feature (10)..(10): 2'-deoxy-2'Fluoro
  misc_feature (11)..(12): 2'-deoxy
  misc_feature (13)..(14): 2'-deoxy-2'Fluoro
  misc_feature (15)..(15): 2'-deoxy
  misc_feature (16)..(16): 2'-deoxy-2'Fluoro
  misc_feature (17)..(19): 2'-deoxy
  misc_feature (1)..(19): ribonucleotide unmodified or modified as described for this sequence
ccgauauggugauugcgggtt

SEQ ID NO: 1879 - DNA, 21 bp, Artificial Sequence
  Description of Artificial Sequence: Target Sequence/siNA sense region (stab07)
  misc_feature (1)..(1): 5'-3 attached terminal deoxyabasic moiety, inverted abasic, inverted nucleotide or other terminal cap that is optionally present
  misc_feature (21)..(21): 3'-3 attached terminal deoxyabasic moiety, inverted abasic, inverted nucleotide or other terminal cap that is optionally present
  misc_feature (1)..(1): 2'-deoxy
  misc_feature (2)..(3): 2'-deoxy-2'Fluoro
  misc_feature (4)..(6): 2'-deoxy
  misc_feature (7)..(7): 2'-deoxy-2'Fluoro
  misc_feature (8)..(8): 2'-deoxy
  misc_feature (9)..(10): 2'-deoxy-2'Fluoro
  misc_feature (11)..(12): 2'-deoxy
  misc_feature (13)..(13): 2'-deoxy-2'Fluoro
  misc_feature (14)..(16): 2'-deoxy
  misc_feature (17)..(17): 2'-deoxy-2'Fluoro
  misc_feature (18)..(18): 2'-deoxy
  misc_feature (19)..(19): 2'-deoxy-2'Fluoro
  misc_feature (1)..(19): ribonucleotide unmodified or modified as described for this sequence
auugggugcuggcgaguactt

SEQ ID NO: 1880 - DNA, 21 bp, Artificial Sequence
  Description of Artificial Sequence: Target Sequence/siNA sense region (stab07)
  misc_feature (1)..(1): 5'-3 attached terminal deoxyabasic moiety, inverted abasic, inverted nucleotide or other terminal cap that is optionally present
  misc_feature (21)..(21): 3'-3 attached terminal deoxyabasic moiety, inverted abasic, inverted nucleotide or other terminal cap that is optionally present
  misc_feature (1)..(1): 2'-deoxy
  misc_feature (2)..(2): 2'-deoxy-2'Fluoro
  misc_feature (3)..(3): 2'-deoxy
  misc_feature (4)..(4): 2'-deoxy-2'Fluoro
  misc_feature (5)..(6): 2'-deoxy
  misc_feature (7)..(7): 2'-deoxy-2'Fluoro
  misc_feature (8)..(8): 2'-deoxy
  misc_feature (9)..(11): 2'-deoxy-2'Fluoro
  misc_feature (12)..(12): 2'-deoxy
  misc_feature (13)..(13): 2'-deoxy-2'Fluoro
  misc_feature (14)..(16): 2'-deoxy
  misc_feature (17)..(17): 2'-deoxy-2'Fluoro
  misc_feature (18)..(19): 2'-deoxy
  misc_feature (1)..(19): ribonucleotide unmodified or modified as described for this sequence
auauggugccugcgaguggtt

SEQ ID NO: 1881 - DNA, 21 bp, Artificial Sequence
  Description of Artificial Sequence: Target Sequence/siNA sense region (stab07)
  misc_feature (1)..(1): 5'-3 attached terminal deoxyabasic moiety, inverted abasic, inverted nucleotide or other terminal cap that is optionally present
  misc_feature (21)..(21): 3'-3 attached terminal deoxyabasic moiety, inverted abasic, inverted nucleotide or other terminal cap that is optionally present
  misc_feature (1)..(6): 2'-deoxy
  misc_feature (7)..(7): 2'-deoxy-2'Fluoro
  misc_feature (8)..(8): 2'-deoxy
  misc_feature (9)..(11): 2'-deoxy-2'Fluoro
  misc_feature (12)..(12): 2'-deoxy
  misc_feature (13)..(13): 2'-deoxy-2'Fluoro
  misc_feature (14)..(14): 2'-deoxy
  misc_feature (15)..(15): 2'-deoxy-2'Fluoro
  misc_feature (16)..(16): 2'-deoxy
  misc_feature (17)..(17): 2'-deoxy-2'Fluoro
  misc_feature (18)..(18): 2'-deoxy
  misc_feature (19)..(19): 2'-deoxy-2'Fluoro
  misc_feature (1)..(19): ribonucleotide unmodified or modified as described for this sequence
agaggguacuugcgcgugutt

SEQ ID NO: 1882 - DNA, 21 bp, Artificial Sequence
  Description of Artificial Sequence: Target Sequence/siNA antisense region (stab08)
  misc_feature (20)..(20): Phosphorothioate or Phosphorodithioate 3'-Internucleotide Linkage (optionally present)
  misc_feature (2)..(2): 2'-deoxy-2'Fluoro
  misc_feature (3)..(3): 2'-O-methyl
  misc_feature (4)..(5): 2'-deoxy-2'Fluoro
  misc_feature (6)..(6): 2'-O-methyl
  misc_feature (7)..(7): 2'-deoxy-2'Fluoro
  misc_feature (8)..(9): 2'-O-methyl
  misc_feature (10)..(10): 2'-deoxy-2'Fluoro
  misc_feature (11)..(11): 2'-O-methyl
  misc_feature (12)..(16): 2'-deoxy-2'Fluoro
  misc_feature (17)..(18): 2'-O-methyl
  misc_feature (19)..(19): 2'-deoxy-2'Fluoro
  misc_feature (1)..(19): ribonucleotide unmodified or modified as described for this sequence
gugccacaacgccuuuagctt

SEQ ID NO: 1883 - DNA, 21 bp, Artificial Sequence
  Description of Artificial Sequence: Target Sequence/siNA antisense region (stab08)
  misc_feature (20)..(20): Phosphorothioate or Phosphorodithioate 3'-Internucleotide Linkage (optionally present)
  misc_feature (1)..(2): 2'-deoxy-2'Fluoro
  misc_feature (3)..(3): 2'-O-methyl
  misc_feature (4)..(5): 2'-deoxy-2'Fluoro
  misc_feature (6)..(6): 2'-O-methyl
  misc_feature (7)..(7): 2'-deoxy-2'Fluoro
  misc_feature (8)..(11): 2'-O-methyl
  misc_feature (12)..(15): 2'-deoxy-2'Fluoro
  misc_feature (16)..(16): 2'-O-methyl
  misc_feature (17)..(17): 2'-deoxy-2'Fluoro
  misc_feature (18)..(18): 2'-O-methyl
  misc_feature (19)..(19): 2'-deoxy-2'Fluoro
  misc_feature (1)..(19): ribonucleotide unmodified or modified as described for this sequence
uuaccacagggccuuacgctt

SEQ ID NO: 1884 - DNA, 21 bp, Artificial Sequence
  Description of Artificial Sequence: Target Sequence/siNA antisense region (stab08)
  misc_feature (20)..(20): Phosphorothioate or Phosphorodithioate 3'-Internucleotide Linkage (optionally present)
  misc_feature (4)..(5): 2'-deoxy-2'Fluoro
  misc_feature (6)..(6): 2'-O-methyl
  misc_feature (7)..(8): 2'-deoxy-2'Fluoro
  misc_feature (9)..(11): 2'-O-methyl
  misc_feature (12)..(12): 2'-deoxy-2'Fluoro
  misc_feature (13)..(13): 2'-O-methyl
  misc_feature (14)..(19): 2'-deoxy-2'Fluoro
  misc_feature (1)..(19): ribonucleotide unmodified or modified as described for this sequence
gaaccaccaggcguuucuctt

SEQ ID NO: 1885 - DNA, 21 bp, Artificial Sequence
  Description of Artificial Sequence: Target Sequence/siNA antisense region (stab08)
  misc_feature (20)..(20): Phosphorothioate or Phosphorodithioate 3'-Internucleotide Linkage (optionally present)
  misc_feature (2)..(3): 2'-deoxy-2'Fluoro
  misc_feature (4)..(4): 2'-O-methyl
  misc_feature (5)..(6): 2'-deoxy-2'Fluoro
  misc_feature (7)..(7): 2'-O-methyl
  misc_feature (8)..(8): 2'-deoxy-2'Fluoro
  misc_feature (9)..(10): 2'-O-methyl
  misc_feature (11)..(11): 2'-deoxy-2'Fluoro
  misc_feature (12)..(12): 2'-O-methyl
  misc_feature (13)..(16): 2'-deoxy-2'Fluoro
  misc_feature (17)..(17): 2'-O-methyl
  misc_feature (18)..(18): 2'-deoxy-2'Fluoro
  misc_feature (19)..(19): 2'-O-methyl
  misc_feature (1)..(19): ribonucleotide unmodified or modified as described for this sequence
agugccacaaugccuuacgtt

SEQ ID NO: 1886 - DNA, 21 bp, Artificial Sequence
  Description of Artificial Sequence: Target Sequence/siNA antisense region (stab08)
  misc_feature (20)..(20): Phosphorothioate or Phosphorodithioate 3'-Internucleotide Linkage (optionally present)
  misc_feature (2)..(3): 2'-deoxy-2'Fluoro
  misc_feature (4)..(5): 2'-O-methyl
  misc_feature (6)..(6): 2'-deoxy-2'Fluoro
  misc_feature (7)..(7): 2'-O-methyl
  misc_feature (8)..(8): 2'-deoxy-2'Fluoro
  misc_feature (9)..(10): 2'-O-methyl
  misc_feature (11)..(11): 2'-deoxy-2'Fluoro
  misc_feature (12)..(12): 2'-O-methyl
  misc_feature (13)..(18): 2'-deoxy-2'Fluoro
  misc_feature (19)..(19): 2'-O-methyl
  misc_feature (1)..(19): ribonucleotide unmodified or modified as described for this sequence
aguagcacaaugccucucgtt

SEQ ID NO: 1887 - DNA, 21 bp, Artificial Sequence
  Description of Artificial Sequence: Target Sequence/siNA antisense region (stab08)
  misc_feature (20)..(20): Phosphorothioate or Phosphorodithioate 3'-Internucleotide Linkage (optionally present)
  misc_feature (3)..(3): 2'-deoxy-2'Fluoro
  misc_feature (4)..(4): 2'-O-methyl
  misc_feature (5)..(8): 2'-deoxy-2'Fluoro
  misc_feature (9)..(12): 2'-O-methyl
  misc_feature (13)..(17): 2'-deoxy-2'Fluoro
  misc_feature (18)..(19): 2'-O-methyl
  misc_feature (1)..(19): ribonucleotide unmodified or modified as described for this sequence
agcaccucaagaccuuuggtt

SEQ ID NO: 1888 - DNA, 21 bp, Artificial Sequence
  Description of Artificial Sequence: Target Sequence/siNA antisense region (stab08)
  misc_feature (20)..(20): Phosphorothioate or Phosphorodithioate 3'-Internucleotide Linkage (optionally present)
  misc_feature (1)..(3): 2'-deoxy-2'Fluoro
  misc_feature (4)..(4): 2'-O-methyl
  misc_feature (5)..(5): 2'-deoxy-2'Fluoro
  misc_feature (6)..(8): 2'-O-methyl
  misc_feature (9)..(9): 2'-deoxy-2'Fluoro
  misc_feature (10)..(11): 2'-O-methyl
  misc_feature (12)..(14): 2'-deoxy-2'Fluoro
  misc_feature (15)..(15): 2'-O-methyl
  misc_feature (16)..(18): 2'-deoxy-2'Fluoro
  misc_feature (19)..(19): 2'-O-methyl
  misc_feature (1)..(19): ribonucleotide unmodified or modified as described for this sequence
cucacaagcagccuauccgtt

SEQ ID NO: 1889 - DNA, 21 bp, Artificial Sequence
  Description of Artificial Sequence: Target Sequence/siNA antisense region (stab08)
  misc_feature (20)..(20): Phosphorothioate or Phosphorodithioate 3'-Internucleotide Linkage (optionally present)
  misc_feature (1)..(5): 2'-deoxy-2'Fluoro
  misc_feature (6)..(8): 2'-O-methyl
  misc_feature (9)..(9): 2'-deoxy-2'Fluoro
  misc_feature (10)..(10): 2'-O-methyl
  misc_feature (11)..(14): 2'-deoxy-2'Fluoro
  misc_feature (15)..(16): 2'-O-methyl
  misc_feature (17)..(17): 2'-deoxy-2'Fluoro
  misc_feature (18)..(19): 2'-O-methyl
  misc_feature (1)..(19): ribonucleotide unmodified or modified as described for this sequence
cucccaaguacccuagcagtt

SEQ ID NO: 1890 - DNA, 21 bp, Artificial Sequence
  Description of Artificial Sequence: Target Sequence/siNA antisense region (stab08)
  misc_feature (20)..(20): Phosphorothioate or Phosphorodithioate 3'-Internucleotide Linkage (optionally present)
  misc_feature (1)..(3): 2'-deoxy-2'Fluoro
  misc_feature (4)..(4): 2'-O-methyl
  misc_feature (5)..(5): 2'-deoxy-2'Fluoro
  misc_feature (6)..(7): 2'-O-methyl
  misc_feature (8)..(9): 2'-deoxy-2'Fluoro
  misc_feature (10)..(10): 2'-O-methyl
  misc_feature (11)..(12): 2'-deoxy-2'Fluoro
  misc_feature (13)..(13): 2'-O-methyl
  misc_feature (14)..(14): 2'-deoxy-2'Fluoro
  misc_feature (15)..(15): 2'-O-methyl
  misc_feature (16)..(17): 2'-deoxy-2'Fluoro
  misc_feature (18)..(19): 2'-O-methyl
  misc_feature (1)..(19): ribonucleotide unmodified or modified as described for this sequence
cccgcaaucaccauaucggtt

SEQ ID NO: 1891 - DNA, 21 bp, Artificial Sequence
  Description of Artificial Sequence: Target Sequence/siNA antisense region (stab08)
  misc_feature (20)..(20): Phosphorothioate or Phosphorodithioate 3'-Internucleotide Linkage (optionally present)
  misc_feature (2)..(2): 2'-deoxy-2'Fluoro
  misc_feature (3)..(3): 2'-O-methyl
  misc_feature (4)..(6): 2'-deoxy-2'Fluoro
  misc_feature (7)..(7): 2'-O-methyl
  misc_feature (8)..(9): 2'-deoxy-2'Fluoro
  misc_feature (10)..(11): 2'-O-methyl
  misc_feature (12)..(12): 2'-deoxy-2'Fluoro
  misc_feature (13)..(13): 2'-O-methyl
  misc_feature (14)..(16): 2'-deoxy-2'Fluoro
  misc_feature (17)..(18): 2'-O-methyl
  misc_feature (19)..(19): 2'-deoxy-2'Fluoro
  misc_feature (1)..(19): ribonucleotide unmodified or modified as described for this sequence
guacucgccagcacccaautt

SEQ ID NO: 1892 - DNA, 21 bp, Artificial Sequence
  Description of Artificial Sequence: Target Sequence/siNA antisense region (stab08)
  misc_feature (20)..(20): Phosphorothioate or Phosphorodithioate 3'-Internucleotide Linkage (optionally present)
  misc_feature (1)..(2): 2'-deoxy-2'Fluoro
  misc_feature (3)..(3): 2'-O-methyl
  misc_feature (4)..(6): 2'-deoxy-2'Fluoro
  misc_feature (7)..(7): 2'-O-methyl
  misc_feature (8)..(8): 2'-deoxy-2'Fluoro
  misc_feature (9)..(11): 2'-O-methyl
  misc_feature (12)..(12): 2'-deoxy-2'Fluoro
  misc_feature (13)..(13): 2'-O-methyl
  misc_feature (14)..(15): 2'-deoxy-2'Fluoro
  misc_feature (16)..(16): 2'-O-methyl
  misc_feature (17)..(17): 2'-deoxy-2'Fluoro
  misc_feature (18)..(18): 2'-O-methyl
  misc_feature (19)..(19): 2'-deoxy-2'Fluoro
  misc_feature (1)..(19): ribonucleotide unmodified or modified as described for this sequence
ccacucgcaggcaccauautt

SEQ ID NO: 1893 - DNA, 21 bp, Artificial Sequence
  Description of Artificial Sequence: Target Sequence/siNA antisense region (stab08)
  misc_feature (20)..(20): Phosphorothioate or Phosphorodithioate 3'-Internucleotide Linkage (optionally present)
  misc_feature (2)..(2): 2'-deoxy-2'Fluoro
  misc_feature (3)..(3): 2'-O-methyl
  misc_feature (4)..(4): 2'-deoxy-2'Fluoro
  misc_feature (5)..(5): 2'-O-methyl
  misc_feature (6)..(6): 2'-deoxy-2'Fluoro
  misc_feature (7)..(7): 2'-O-methyl
  misc_feature (8)..(8): 2'-deoxy-2'Fluoro
  misc_feature (9)..(11): 2'-O-methyl
  misc_feature (12)..(12): 2'-deoxy-2'Fluoro
  misc_feature (13)..(13): 2'-O-methyl
  misc_feature (14)..(19): 2'-deoxy-2'Fluoro
  misc_feature (1)..(19): ribonucleotide unmodified or modified as described for this sequence
acacgcgcaaguacccucutt

SEQ ID NO: 1894 - DNA, 21 bp, Artificial Sequence
  Description of Artificial Sequence: Target Sequence/siNA sense region (stab07)
  misc_feature (1)..(1): 5'-3 attached terminal deoxyabasic moiety, inverted abasic, inverted nucleotide or other terminal cap that is optionally present
  misc_feature (21)..(21): 3'-3 attached terminal deoxyabasic moiety, inverted abasic, inverted nucleotide or other terminal cap that is optionally present
  misc_feature (1)..(1): 2'-deoxy-2'Fluoro
  misc_feature (2)..(2): 2'-deoxy
  misc_feature (3)..(3): 2'-deoxy-2'Fluoro
  misc_feature (4)..(5): 2'-deoxy
  misc_feature (6)..(6): 2'-deoxy-2'Fluoro
  misc_feature (7)..(7): 2'-deoxy
  misc_feature (8)..(11): 2'-deoxy-2'Fluoro
  misc_feature (12)..(17): 2'-deoxy
  misc_feature (18)..(18): 2'-deoxy-2'Fluoro
  misc_feature (19)..(19): 2'-deoxy
  misc_feature (1)..(19): ribonucleotide unmodified or modified as described for this sequence
caugguguuccggaaagcgtt

SEQ ID NO: 1895 - DNA, 21 bp, Artificial Sequence
  Description of Artificial Sequence: Target Sequence/siNA sense region (stab07)
  misc_feature (1)..(1): 5'-3 attached terminal deoxyabasic moiety, inverted abasic, inverted nucleotide or other terminal cap that is optionally present
  misc_feature (21)..(21): 3'-3 attached terminal deoxyabasic moiety, inverted abasic, inverted nucleotide or other terminal cap that is optionally present
  misc_feature (1)..(2): 2'-deoxy-2'Fluoro
  misc_feature (3)..(3): 2'-deoxy
  misc_feature (4)..(4): 2'-deoxy-2'Fluoro
  misc_feature (5)..(6): 2'-deoxy
  misc_feature (7)..(7): 2'-deoxy-2'Fluoro
  misc_feature (8)..(8): 2'-deoxy
  misc_feature (9)..(12): 2'-deoxy-2'Fluoro
  misc_feature (13)..(18): 2'-deoxy
  misc_feature (19)..(19): 2'-deoxy-2'Fluoro
  misc_feature (1)..(19): ribonucleotide unmodified or modified as described for this sequence
ucaugguguuccggaaagctt

SEQ ID NO: 1896 - DNA, 21 bp, Artificial Sequence
  Description of Artificial Sequence: Target Sequence/siNA sense region (stab07)
  misc_feature (1)..(1): 5'-3 attached terminal deoxyabasic moiety, inverted abasic, inverted nucleotide or other terminal cap that is optionally present
  misc_feature (21)..(21): 3'-3 attached terminal deoxyabasic moiety, inverted abasic, inverted nucleotide or other terminal cap that is optionally present
  misc_feature (1)..(3): 2'-deoxy
  misc_feature (4)..(4): 2'-deoxy-2'Fluoro
  misc_feature (5)..(5): 2'-deoxy
  misc_feature (6)..(8): 2'-deoxy-2'Fluoro
  misc_feature (9)..(9): 2'-deoxy
  misc_feature (10)..(10): 2'-deoxy-2'Fluoro
  misc_feature (11)..(14): 2'-deoxy
  misc_feature (15)..(15): 2'-deoxy-2'Fluoro
  misc_feature (16)..(17): 2'-deoxy
  misc_feature (18)..(19): 2'-deoxy-2'Fluoro
  misc_feature (1)..(19): ribonucleotide unmodified or modified as described for this sequence
gagcguucgugggauaguctt

SEQ ID NO: 1897 - DNA, 21 bp, Artificial Sequence
  Description of Artificial Sequence: Target Sequence/siNA sense region (stab07)
  misc_feature (1)..(1): 5'-3 attached terminal deoxyabasic moiety, inverted abasic, inverted nucleotide or other terminal cap that is optionally present
  misc_feature (21)..(21): 3'-3 attached terminal deoxyabasic moiety, inverted abasic, inverted nucleotide or other terminal cap that is optionally present
  misc_feature (1)..(1): 2'-deoxy-2'Fluoro
  misc_feature (2)..(2): 2'-deoxy
  misc_feature (3)..(3): 2'-deoxy-2'Fluoro
  misc_feature (4)..(6): 2'-deoxy
  misc_feature (7)..(7): 2'-deoxy-2'Fluoro
  misc_feature (8)..(8): 2'-deoxy
  misc_feature (9)..(11): 2'-deoxy-2'Fluoro
  misc_feature (12)..(12): 2'-deoxy
  misc_feature (13)..(13): 2'-deoxy-2'Fluoro
  misc_feature (14)..(17): 2'-deoxy
  misc_feature (18)..(18): 2'-deoxy-2'Fluoro
  misc_feature (19)..(19): 2'-deoxy
  misc_feature (1)..(19): ribonucleotide unmodified or modified as described for this sequence
cgugagcguucgugggauatt

SEQ ID NO: 1898 - DNA, 21 bp, Artificial Sequence
  Description of Artificial Sequence: Target Sequence/siNA antisense region (stab08)
  misc_feature (20)..(20): Phosphorothioate or Phosphorodithioate 3'-Internucleotide Linkage (optionally present)
  misc_feature (1)..(1): 2'-deoxy-2'Fluoro
  misc_feature (2)..(2): 2'-O-methyl
  misc_feature (3)..(8): 2'-deoxy-2'Fluoro
  misc_feature (9)..(12): 2'-O-methyl
  misc_feature (13)..(13): 2'-deoxy-2'Fluoro
  misc_feature (14)..(14): 2'-O-methyl
  misc_feature (15)..(16): 2'-deoxy-2'Fluoro
  misc_feature (17)..(17): 2'-O-methyl
  misc_feature (18)..(18): 2'-deoxy-2'Fluoro
  misc_feature (19)..(19): 2'-O-methyl
  misc_feature (1)..(19): ribonucleotide unmodified or modified as described for this sequence
cgcuuuccggaacaccaugtt

SEQ ID NO: 1899 - DNA, 21 bp, Artificial Sequence
  Description of Artificial Sequence: Target Sequence/siNA antisense region (stab08)
  misc_feature (20)..(20): Phosphorothioate or Phosphorodithioate 3'-Internucleotide Linkage (optionally present)
  misc_feature (2)..(7): 2'-deoxy-2'Fluoro
  misc_feature (8)..(11): 2'-O-methyl
  misc_feature (12)..(12): 2'-deoxy-2'Fluoro
  misc_feature (13)..(13): 2'-O-methyl
  misc_feature (14)..(15): 2'-deoxy-2'Fluoro
  misc_feature (16)..(16): 2'-O-methyl
  misc_feature (17)..(17): 2'-deoxy-2'Fluoro
  misc_feature (18)..(19): 2'-O-methyl
  misc_feature (1)..(19): ribonucleotide unmodified or modified as described for this sequence
gcuuuccggaacaccaugatt

SEQ ID NO: 1900 - DNA, 21 bp, Artificial Sequence
  Description of Artificial Sequence: Target Sequence/siNA antisense region (stab08)
  misc_feature (20)..(20): Phosphorothioate or Phosphorodithioate 3'-Internucleotide Linkage (optionally present)
  misc_feature (3)..(4): 2'-deoxy-2'Fluoro
  misc_feature (5)..(5): 2'-O-methyl
  misc_feature (6)..(9): 2'-deoxy-2'Fluoro
  misc_feature (10)..(10): 2'-O-methyl
  misc_feature (11)..(11): 2'-deoxy-2'Fluoro
  misc_feature (12)..(14): 2'-O-methyl
  misc_feature (15)..(15): 2'-deoxy-2'Fluoro
  misc_feature (16)..(16): 2'-O-methyl
  misc_feature (17)..(19): 2'-deoxy-2'Fluoro
  misc_feature (1)..(19): ribonucleotide unmodified or modified as described for this sequence
gacuaucccacgaacgcuctt

SEQ ID NO: 1901 - DNA, 21 bp, Artificial Sequence
  Description of Artificial Sequence: Target Sequence/siNA antisense region (stab08)
  misc_feature (20)..(20): Phosphorothioate or Phosphorodithioate 3'-Internucleotide Linkage (optionally present)
  misc_feature (1)..(1): 2'-deoxy-2'Fluoro
  misc_feature (2)..(2): 2'-O-methyl
  misc_feature (3)..(6): 2'-deoxy-2'Fluoro
  misc_feature (7)..(7): 2'-O-methyl
  misc_feature (8)..(8): 2'-deoxy-2'Fluoro
  misc_feature (9)..(11): 2'-O-methyl
  misc_feature (12)..(12): 2'-deoxy-2'Fluoro
  misc_feature (13)..(13): 2'-O-methyl
  misc_feature (14)..(16): 2'-deoxy-2'Fluoro
  misc_feature (17)..(17): 2'-O-methyl
  misc_feature (18)..(18): 2'-deoxy-2'Fluoro
  misc_feature (19)..(19): 2'-O-methyl
  misc_feature (1)..(19): ribonucleotide unmodified or modified as described for this sequence
uaucccacgaacgcucacgtt

SEQ ID NO: 1902 - RNA, 28 nt, Artificial Sequence
  Description of Artificial Sequence: Target Sequence/siNA antisense region
  misc_feature (28)..(28): 3'-3 attached terminal deoxyabasic moiety, inverted abasic, inverted nucleotide or other terminal cap that is optionally present
  misc_feature (1)..(1): Terminal 5' phosphate
ucauacuaacgccauggcguuaguauga

SEQ ID NO: 1903 - RNA, 26 nt, Artificial Sequence
  Description of Artificial Sequence: Target Sequence/siNA antisense region
  misc_feature (26)..(26): 3'-3 attached terminal deoxyabasic moiety, inverted abasic, inverted nucleotide or other terminal cap that is optionally present
  misc_feature (1)..(1): Terminal 5' phosphate
cauacuaacgccauggcguuaguaug

SEQ ID NO: 1904 - RNA, 24 nt, Artificial Sequence
  Description of Artificial Sequence: Target Sequence/siNA antisense region
  misc_feature (24)..(24): 3'-3 attached terminal deoxyabasic moiety, inverted abasic, inverted nucleotide or other terminal cap that is optionally present
  misc_feature (1)..(1): Terminal 5' phosphate
auacuaacgccauggcguuaguau

SEQ ID NO: 1905 - RNA, 22 nt, Artificial Sequence
  Description of Artificial Sequence: Target Sequence/siNA antisense region
  misc_feature (22)..(22): 3'-3 attached terminal deoxyabasic moiety, inverted abasic, inverted nucleotide or other terminal cap that is optionally present
  misc_feature (1)..(1): Terminal 5' phosphate
uacuaacgccauggcguuagua

SEQ ID NO: 1906 - RNA, 28 nt, Artificial Sequence
  Description of Artificial Sequence: Target Sequence/siNA antisense region
  misc_feature (28)..(28): 3'-3 attached terminal deoxyabasic moiety, inverted abasic, inverted nucleotide or other terminal cap that is optionally present
  misc_feature (1)..(1): Terminal 5' phosphate
acuauggcucucccgggagagccauagu

SEQ ID NO: 1907 - RNA, 26 nt, Artificial Sequence
  Description of Artificial Sequence: Target Sequence/siNA antisense region
  misc_feature (26)..(26): 3'-3 attached terminal deoxyabasic moiety, inverted abasic, inverted nucleotide or other terminal cap that is optionally present
  misc_feature (1)..(1): Terminal 5' phosphate
cuauggcucucccgggagagccauag

SEQ ID NO: 1908 - RNA, 24 nt, Artificial Sequence
  Description of Artificial Sequence: Target Sequence/siNA antisense region
  misc_feature (24)..(24): 3'-3 attached terminal deoxyabasic moiety, inverted abasic, inverted nucleotide or other terminal cap that is optionally present
  misc_feature (1)..(1): Terminal 5' phosphate
uauggcucucccgggagagccaua

SEQ ID NO: 1909 - RNA, 22 nt, Artificial Sequence
  Description of Artificial Sequence: Target Sequence/siNA antisense region
  misc_feature (22)..(22): 3'-3 attached terminal deoxyabasic moiety, inverted abasic, inverted nucleotide or other terminal cap that is optionally present
  misc_feature (1)..(1): Terminal 5' phosphate
auggcucucccgggagagccau

SEQ ID NO: 1910 - RNA, 20 nt, Artificial Sequence
  Description of Artificial Sequence: Target Sequence/siNA antisense region
  misc_feature (20)..(20): 3'-3 attached terminal deoxyabasic moiety, inverted abasic, inverted nucleotide or other terminal cap that is optionally present
  misc_feature (1)..(1): Terminal 5' phosphate
uggcucucccgggagagcca

SEQ ID NO: 1911 - RNA, 28 nt, Artificial Sequence
  Description of Artificial Sequence: Target Sequence/siNA antisense region
  misc_feature (28)..(28): 3'-3 attached terminal deoxyabasic moiety, inverted abasic, inverted nucleotide or other terminal cap that is optionally present
  misc_feature (1)..(1): Terminal 5' phosphate
ccgguguacucaccggugaguacaccgg

SEQ ID NO: 1912 - RNA, 26 nt, Artificial Sequence
  Description of Artificial Sequence: Target Sequence/siNA antisense region
  misc_feature (26)..(26): 3'-3 attached terminal deoxyabasic moiety, inverted abasic, inverted nucleotide or other terminal cap that is optionally present
  misc_feature (1)..(1): Terminal 5' phosphate
cgguguacucaccggugaguacaccg

SEQ ID NO: 1913 - RNA, 24 nt, Artificial Sequence
  Description of Artificial Sequence: Target Sequence/siNA antisense region
  misc_feature (24)..(24): 3'-3 attached terminal deoxyabasic moiety, inverted abasic, inverted nucleotide or other terminal cap that is optionally present
  misc_feature (1)..(1): Terminal 5' phosphate
gguguacucaccggugaguacacc

SEQ ID NO: 1914 - RNA, 28 nt, Artificial Sequence
  Description of Artificial Sequence: Target Sequence/siNA antisense region
  misc_feature (28)..(28): 3'-3 attached terminal deoxyabasic moiety, inverted abasic, inverted nucleotide or other terminal cap that is optionally present
  misc_feature (1)..(1): Terminal 5' phosphate
cuacgagaccucccgggaggucucguag

SEQ ID NO: 1915 - RNA, 26 nt, Artificial Sequence
  Description of Artificial Sequence: Target Sequence/siNA antisense region
  misc_feature (26)..(26): 3'-3 attached terminal deoxyabasic moiety, inverted abasic, inverted nucleotide or other terminal cap that is optionally present
  misc_feature (1)..(1): Terminal 5' phosphate
uacgagaccucccgggaggucucgua

SEQ ID NO: 1916 - RNA, 24 nt, Artificial Sequence
  Description of Artificial Sequence: Target Sequence/siNA antisense region
  misc_feature (24)..(24): 3'-3 attached terminal deoxyabasic moiety, inverted abasic, inverted nucleotide or other terminal cap that is optionally present
  misc_feature (1)..(1): Terminal 5' phosphate
acgagaccucccgggaggucucgu

SEQ ID NO: 1917 - DNA, 21 bp, Artificial Sequence
  Description of Artificial Sequence: Target Sequence/siNA antisense region (stab19)
  misc_feature (21)..(21): 3'-3 attached terminal deoxyabasic moiety, inverted abasic, inverted nucleotide or other terminal cap that is optionally present
  misc_feature (3)..(5): 2'-deoxy-2'Fluoro
  misc_feature (7)..(7): 2'-deoxy-2'Fluoro
  misc_feature (12)..(17): 2'-deoxy-2'Fluoro
  misc_feature (1)..(19): ribonucleotide unmodified or modified as described for this sequence
ggucuacgagaccucccggtt

SEQ ID NO: 1918 - DNA, 21 bp, Artificial Sequence
  Description of Artificial Sequence: Target Sequence/siNA antisense region (stab19)
  misc_feature (21)..(21): 3'-3 attached terminal deoxyabasic moiety, inverted abasic, inverted nucleotide or other terminal cap that is optionally present
  misc_feature (3)..(8): 2'-deoxy-2'Fluoro
  misc_feature (13)..(13): 2'-deoxy-2'Fluoro
  misc_feature (15)..(17): 2'-deoxy-2'Fluoro
  misc_feature (1)..(19): ribonucleotide unmodified or modified as described for this sequence
ggcccuccagagcaucuggtt

SEQ ID NO: 1919 - DNA, 21 bp, Artificial Sequence
  Description of Artificial Sequence: Target Sequence/siNA antisense region (stab19)
  misc_feature (21)..(21): 3'-3 attached terminal deoxyabasic moiety, inverted abasic, inverted nucleotide or other terminal cap that is optionally present
  misc_feature (1)..(3): 2'-deoxy-2'Fluoro
  misc_feature (5)..(5): 2'-deoxy-2'Fluoro
  misc_feature (9)..(9): 2'-deoxy-2'Fluoro
  misc_feature (11)..(14): 2'-deoxy-2'Fluoro
  misc_feature (16)..(17): 2'-deoxy-2'Fluoro
  misc_feature (1)..(19): ribonucleotide unmodified or modified as described for this sequence
cucgcaagcacccuaucagtt

SEQ ID NO: 1920 - DNA, 21 bp, Artificial Sequence
  Description of Artificial Sequence: Target Sequence/siNA antisense region (stab19)
  misc_feature (21)..(21): 3'-3 attached terminal deoxyabasic moiety, inverted abasic, inverted nucleotide or other terminal cap that is optionally present
  misc_feature (3)..(4): 2'-deoxy-2'Fluoro
  misc_feature (6)..(9): 2'-deoxy-2'Fluoro
  misc_feature (11)..(11): 2'-deoxy-2'Fluoro
  misc_feature (15)..(15): 2'-deoxy-2'Fluoro
  misc_feature (17)..(19): 2'-deoxy-2'Fluoro
  misc_feature (1)..(19): ribonucleotide unmodified or modified as described for this sequence
gacuaucccacgaacgcuctt

SEQ ID NO: 1921 - DNA, 21 bp, Artificial Sequence
  Description of Artificial Sequence: Target Sequence/siNA sense region (stab00)
  misc_feature (1)..(19): ribonucleotide unmodified or modified as described for this sequence
gcgaaaggccuugugguactt

SEQ ID NO: 1922 - DNA, 21 bp, Artificial Sequence
  Description of Artificial Sequence: Target Sequence/siNA sense region (stab00)
  misc_feature (1)..(19): ribonucleotide unmodified or modified as described for this sequence
cgaaaggccuugugguacutt

SEQ ID NO: 1923 - DNA, 21 bp, Artificial Sequence
  Description of Artificial Sequence: Target Sequence/siNA sense region (stab00)
  misc_feature (1)..(19): ribonucleotide unmodified or modified as described for this sequence
cugauagggugcuugcgagtt

SEQ ID NO: 1924 - DNA, 21 bp, Artificial Sequence
  Description of Artificial Sequence: Target Sequence/siNA sense region (stab00)
  misc_feature (1)..(19): ribonucleotide unmodified or modified as described for this sequence
auagggugcuugcgagugctt

SEQ ID NO: 1925 - DNA, 21 bp, Artificial Sequence
  Description of Artificial Sequence: Target Sequence/siNA sense region (stab00)
  misc_feature (1)..(19): ribonucleotide unmodified or modified as described for this sequence
ccgggaggucucguagacctt

SEQ ID NO: 1926 - DNA, 21 bp, Artificial Sequence
  Description of Artificial Sequence: Target Sequence/siNA antisense region (stab00)
  misc_feature (1)..(19): ribonucleotide unmodified or modified as described for this sequence
guaccacaaggccuuucgctt

SEQ ID NO: 1927 - DNA, 21 bp, Artificial Sequence
  Description of Artificial Sequence: Target Sequence/siNA antisense region (stab00)
  misc_feature (1)..(19): ribonucleotide unmodified or modified as described for this sequence
aguaccacaaggccuuucgtt

SEQ ID NO: 1928 - DNA, 21 bp, Artificial Sequence
  Description of Artificial Sequence: Target Sequence/siNA antisense region (stab00)
  misc_feature (1)..(19): ribonucleotide unmodified or modified as described for this sequence
cucgcaagcacccuaucagtt

SEQ ID NO: 1929 - DNA, 21 bp, Artificial Sequence
  Description of Artificial Sequence: Target Sequence/siNA antisense region (stab00)
  misc_feature (1)..(19): ribonucleotide unmodified or modified as described for this sequence
gcacucgcaagcacccuautt

SEQ ID NO: 1930 - DNA, 21 bp, Artificial Sequence
  Description of Artificial Sequence: Target Sequence/siNA sense region (stab00)
  misc_feature (1)..(19): ribonucleotide unmodified or modified as described for this sequence
caugguguuccggaaagcgtt

SEQ ID NO: 1931 - DNA, 21 bp, Artificial Sequence
  Description of Artificial Sequence: Target Sequence/siNA sense region (stab00)
  misc_feature (1)..(19): ribonucleotide unmodified or modified as described for this sequence
ucaugguguuccggaaagctt

SEQ ID NO: 1932 - DNA, 21 bp, Artificial Sequence
  Description of Artificial Sequence: Target Sequence/siNA sense region (stab00)
  misc_feature (1)..(19): ribonucleotide unmodified or modified as described for this sequence
gagcguucgugggauaguctt

SEQ ID NO: 1933 - DNA, 21 bp, Artificial Sequence
  Description of Artificial Sequence: Target Sequence/siNA sense region (stab00)
  misc_feature (1)..(19): ribonucleotide unmodified or modified as described for this sequence
cgugagcguucgugggauatt

SEQ ID NO: 1934 - DNA, 21 bp, Artificial Sequence
  Description of Artificial Sequence: Target Sequence/siNA sense region (stab00)
  misc_feature (1)..(19): ribonucleotide unmodified or modified as described for this sequence
ccagaugcucuggagggcctt

SEQ ID NO: 1935 - DNA, 21 bp, Artificial Sequence
  Description of Artificial Sequence: Target Sequence/siNA antisense region (stab00)
  misc_feature (1)..(19): ribonucleotide unmodified or modified as described for this sequence
cgcuuuccggaacaccaugtt

SEQ ID NO: 1936 - DNA, 21 bp, Artificial Sequence
  Description of Artificial Sequence: Target Sequence/siNA antisense region (stab00)
  misc_feature (1)..(19): ribonucleotide unmodified or modified as described for this sequence
gcuuuccggaacaccaugatt

SEQ ID NO: 1937 - DNA, 21 bp, Artificial Sequence
  Description of Artificial Sequence: Target Sequence/siNA antisense region (stab00)
  misc_feature (1)..(19): ribonucleotide unmodified or modified as described for this sequence
gacuaucccacgaacgcuctt

SEQ ID NO: 1938 - DNA, 21 bp, Artificial Sequence
  Description of Artificial Sequence: Target Sequence/siNA antisense region (stab00)
  misc_feature (1)..(19): ribonucleotide unmodified or modified as described for this sequence
uaucccacgaacgcucacgtt

SEQ ID NO: 1939 - DNA, 21 bp, Artificial Sequence
  Description of Artificial Sequence: Target Sequence/siNA antisense region (stab00)
  misc_feature (1)..(19): ribonucleotide unmodified or modified as described for this sequence
ggcccuccagagcaucuggtt

SEQ ID NO: 1940 - DNA, 21 bp, Artificial Sequence
  Description of Artificial Sequence: Target Sequence/siNA sense region (stab07)
  misc_feature (1)..(1): 5'-3 attached terminal deoxyabasic moiety, inverted abasic, inverted nucleotide or other terminal cap that is optionally present
  misc_feature (21)..(21): 3'-3 attached terminal deoxyabasic moiety, inverted abasic, inverted nucleotide or other terminal cap that is optionally present
  misc_feature (1)..(2): 2'-deoxy-2'Fluoro
  misc_feature (9)..(12): 2'-deoxy-2'Fluoro
  misc_feature (1)..(19): ribonucleotide unmodified or modified as described for this sequence
ccgggaggucucguagacctt

SEQ ID NO: 1941 - DNA, 21 bp, Artificial Sequence
  Description of Artificial Sequence: Target Sequence/siNA antisense region (stab08)
  misc_feature (20)..(20): Phosphorothioate or Phosphorodithioate 3'-Internucleotide Linkage (optionally present)
  misc_feature (6)..(6): 2'-O-methyl
  misc_feature (7)..(7): 2'-deoxy-2'Fluoro
  misc_feature (8)..(11): 2'-O-methyl
  misc_feature (12)..(17): 2'-deoxy-2'Fluoro
  misc_feature (18)..(19): 2'-O-methyl
  misc_feature (1)..(19): ribonucleotide unmodified or modified as described for this sequence
ggucuacgagaccucccggtt

SEQ ID NO: 1942 - DNA, 21 bp, Artificial Sequence
  Description of Artificial Sequence: Target Sequence/siNA antisense region (stab25)
  misc_feature (20)..(20): Phosphorothioate or Phosphorodithioate 3'-Internucleotide Linkage (optionally present)
  misc_feature (4)..(5): 2'-deoxy-2'Fluoro
  misc_feature (6)..(6): 2'-O-methyl
  misc_feature (7)..(7): 2'-deoxy-2'Fluoro
  misc_feature (8)..(11): 2'-O-methyl
  misc_feature (12)..(17): 2'-deoxy-2'Fluoro
  misc_feature (18)..(19): 2'-O-methyl
  misc_feature (1)..(19): ribonucleotide unmodified or modified as described for this sequence
ggucuacgagaccucccggtt

SEQ ID NO: 1943 - DNA, 21 bp, Artificial Sequence
  Description of Artificial Sequence: Target Sequence/siNA antisense region (stab08)
  misc_feature (20)..(20): Phosphorothioate or Phosphorodithioate 3'-Internucleotide Linkage (optionally present)
  misc_feature (3)..(5): 2'-deoxy-2'Fluoro
  misc_feature (6)..(6): 2'-O-methyl
  misc_feature (7)..(7): 2'-deoxy-2'Fluoro
  misc_feature (8)..(11): 2'-O-methyl
  misc_feature (12)..(17): 2'-deoxy-2'Fluoro
  misc_feature (18)..(19): 2'-O-methyl
  misc_feature (1)..(19): ribonucleotide unmodified or modified as described for this sequence
ggucuacgagaccucccggtt

SEQ ID NO: 1944 - DNA, 21 bp, Artificial Sequence
  Description of Artificial Sequence: Target Sequence/siNA antisense region (stab24)
  misc_feature (20)..(20): Phosphorothioate or Phosphorodithioate 3'-Internucleotide Linkage (optionally present)
  misc_feature (3)..(5): 2'-deoxy-2'Fluoro
  misc_feature (6)..(6): 2'-O-methyl
  misc_feature (7)..(7): 2'-deoxy-2'Fluoro
  misc_feature (8)..(11): 2'-O-methyl
  misc_feature (12)..(17): 2'-deoxy-2'Fluoro
  misc_feature (18)..(19): 2'-O-methyl
  misc_feature (1)..(19): ribonucleotide unmodified or modified as described for this sequence
ggucuacgagaccucccggtt

SEQ ID NO: 1945 - DNA, 21 bp, Artificial Sequence
  Description of Artificial Sequence: Target Sequence/siNA sense region (stab07)
  misc_feature (1)..(1): 5'-3 attached terminal deoxyabasic moiety, inverted abasic, inverted nucleotide or other terminal cap that is optionally present
  misc_feature (21)..(21): 3'-3 attached terminal deoxyabasic moiety, inverted abasic, inverted nucleotide or other terminal cap that is optionally present
  misc_feature (1)..(2): 2'-deoxy-2'Fluoro
  misc_feature (3)..(4): 2'-deoxy
  misc_feature (5)..(5): 2'-deoxy-2'Fluoro
  misc_feature (6)..(9): 2'-deoxy
  misc_feature (10)..(10): 2'-deoxy-2'Fluoro
  misc_feature (11)..(11): 2'-deoxy
  misc_feature (12)..(13): 2'-deoxy-2'Fluoro
  misc_feature (15)..(15): 2'-deoxy
  misc_feature (17)..(19): 2'-deoxy
  misc_feature (1)..(19): ribonucleotide unmodified or modified as described for this sequence
cugauagggugcuugcgagtt

SEQ ID NO: 1946 - DNA, 21 bp, Artificial Sequence
  Description of Artificial Sequence: Target Sequence/siNA antisense region (stab08)
  misc_feature (20)..(20): Phosphorothioate or Phosphorodithioate 3'-Internucleotide Linkage (optionally present)
  misc_feature (4)..(4): 2'-O-methyl
  misc_feature (6)..(8): 2'-O-methyl
  misc_feature (9)..(9): 2'-deoxy-2'Fluoro
  misc_feature (10)..(10): 2'-O-methyl
  misc_feature (11)..(14): 2'-deoxy-2'Fluoro
  misc_feature (15)..(15): 2'-O-methyl
  misc_feature (16)..(17): 2'-deoxy-2'Fluoro
  misc_feature (18)..(19): 2'-O-methyl
  misc_feature (1)..(19): ribonucleotide unmodified or modified as described for this sequence
cucgcaagcacccuaucagtt

SEQ ID NO: 1947 - DNA, 21 bp, Artificial Sequence
  Description of Artificial Sequence: Target Sequence/siNA antisense region (stab25)
  misc_feature (20)..(20): Phosphorothioate or Phosphorodithioate 3'-Internucleotide Linkage (optionally present)
  misc_feature (4)..(4): 2'-O-methyl
  misc_feature (5)..(5): 2'-deoxy-2'Fluoro
  misc_feature (6)..(8): 2'-O-methyl
  misc_feature (9)..(9): 2'-deoxy-2'Fluoro
  misc_feature (10)..(10): 2'-O-methyl
  misc_feature (11)..(14): 2'-deoxy-2'Fluoro
  misc_feature (15)..(15): 2'-O-methyl
  misc_feature (16)..(17): 2'-deoxy-2'Fluoro
  misc_feature (18)..(19): 2'-O-methyl
  misc_feature (1)..(19): ribonucleotide unmodified or modified as described for this sequence
cucgcaagcacccuaucagtt

SEQ ID NO: 1948 - DNA, 21 bp, Artificial Sequence
  Description of Artificial Sequence: Target Sequence/siNA antisense region (stab08)
  misc_feature (20)..(20): Phosphorothioate or Phosphorodithioate 3'-Internucleotide Linkage (optionally present)
  misc_feature (3)..(3): 2'-deoxy-2'Fluoro
  misc_feature (4)..(4): 2'-O-methyl
  misc_feature (5)..(5): 2'-deoxy-2'Fluoro
  misc_feature (6)..(8): 2'-O-methyl
  misc_feature (9)..(9): 2'-deoxy-2'Fluoro
  misc_feature (10)..(10): 2'-O-methyl
  misc_feature (11)..(14): 2'-deoxy-2'Fluoro
  misc_feature (15)..(15): 2'-O-methyl
  misc_feature (16)..(17): 2'-deoxy-2'Fluoro
  misc_feature (18)..(19): 2'-O-methyl
  misc_feature (1)..(19): ribonucleotide unmodified or modified as described for this sequence
cucgcaagcacccuaucagtt

SEQ ID NO: 1949 - DNA, 21 bp, Artificial Sequence
  Description of Artificial Sequence: Target Sequence/siNA antisense region (stab24)
  misc_feature (20)..(20): Phosphorothioate or Phosphorodithioate 3'-Internucleotide Linkage (optionally present)
  misc_feature (2)..(3): 2'-deoxy-2'Fluoro
  misc_feature (4)..(4): 2'-O-methyl
  misc_feature (5)..(5): 2'-deoxy-2'Fluoro
  misc_feature (6)..(8): 2'-O-methyl
  misc_feature (9)..(9): 2'-deoxy-2'Fluoro
  misc_feature (10)..(10): 2'-O-methyl
  misc_feature (11)..(14): 2'-deoxy-2'Fluoro
  misc_feature (15)..(15): 2'-O-methyl
  misc_feature (16)..(17): 2'-deoxy-2'Fluoro
  misc_feature (18)..(19): 2'-O-methyl
  misc_feature (1)..(19): ribonucleotide unmodified or modified as described for this sequence
cucgcaagcacccuaucagtt

SEQ ID NO: 1950 - RNA, 38 nt, Artificial Sequence
  Description of Artificial Sequence: Target Sequence/siNA STRAND region (stab0)
ggucuacgagaccucccggccgggaggucucguagacc

SEQ ID NO: 1951 - DNA, 40 bp, Artificial Sequence
  Description of Artificial Sequence: Target Sequence/siNA STRAND region (stab0)
  misc_feature (1)..(38): ribonucleotide unmodified or modified as described for this sequence
ggucuacgagaccucccggccgggaggucucguagacctt

SEQ ID NO: 1952 - RNA, 36 nt, Artificial Sequence
  Description of Artificial Sequence: Target Sequence/siNA STRAND region (stab0)
ggucuacgagaccucccgcgggaggucucguagacc

SEQ ID NO: 1953 - DNA, 38 bp, Artificial Sequence
  Description of Artificial Sequence: Target Sequence/siNA STRAND region (stab0)
  misc_feature (1)..(36): ribonucleotide unmodified or modified as described for this sequence
ggucuacgagaccucccgcgggaggucucguagacctt

SEQ ID NO: 1954 - RNA, 34 nt, Artificial Sequence
  Description of Artificial Sequence: Target Sequence/siNA STRAND region (stab0)
ggucuacgagaccucccgggaggucucguagacc

SEQ ID NO: 1955 - DNA, 36 bp, Artificial Sequence
  Description of Artificial Sequence: Target Sequence/siNA STRAND region (stab0)
  misc_feature (1)..(34): ribonucleotide unmodified or modified as described for this sequence
ggucuacgagaccucccgggaggucucguagacctt

SEQ ID NO: 1956 - RNA, 32 nt, Artificial Sequence
  Description of Artificial Sequence: Target Sequence/siNA STRAND region (stab0)
ggucuacgagaccuccggaggucucguagacc

SEQ ID NO: 1957 - DNA, 34 bp, Artificial Sequence
  Description of Artificial Sequence: Target Sequence/siNA STRAND region (stab0)
  misc_feature (1)..(32): ribonucleotide unmodified or modified as described for this sequence
ggucuacgagaccuccggaggucucguagacctt

SEQ ID NO: 1958 - RNA, 32 nt, Artificial Sequence
  Description of Artificial Sequence: Target Sequence/siNA STRAND region (stab0)
gucuacgagaccucccgggaggucucguagac

SEQ ID NO: 1959 - DNA, 34 bp, Artificial Sequence
  Description of Artificial Sequence: Target Sequence/siNA STRAND region (stab0)
  misc_feature (1)..(32): ribonucleotide unmodified or modified as described for this sequence
gucuacgagaccucccgggaggucucguagactt

SEQ ID NO: 1960 - RNA, 30 nt, Artificial Sequence
  Description of Artificial Sequence: Target Sequence/siNA STRAND region (stab0)
ucuacgagaccucccgggaggucucguaga

SEQ ID NO: 1961 - DNA, 32 bp, Artificial Sequence
  Description of Artificial Sequence: Target Sequence/siNA STRAND region (stab0)
  misc_feature (1)..(30): ribonucleotide unmodified or modified as described for this sequence
ucuacgagaccucccgggaggucucguagatt

SEQ ID NO: 1962 - RNA, 28 nt, Artificial Sequence
  Description of Artificial Sequence: Target Sequence/siNA STRAND region (stab0)
cuacgagaccucccgggaggucucguag

SEQ ID NO: 1963 - DNA, 30 bp, Artificial Sequence
  Description of Artificial Sequence: Target Sequence/siNA STRAND region (stab0)
  misc_feature (1)..(28): ribonucleotide unmodified or modified as described for this sequence
cuacgagaccucccgggaggucucguagtt

SEQ ID NO: 1964 - RNA, 30 nt, Artificial Sequence
  Description of Artificial Sequence: Target Sequence/siNA STRAND region (stab0)
ggucuacgagaccuccaggucucguagacc

SEQ ID NO: 1965 - DNA, 32 bp, Artificial Sequence
  Description of Artificial Sequence: Target Sequence/siNA STRAND region (stab0)
  misc_feature (1)..(30): ribonucleotide unmodified or modified as described for this sequence
ggucuacgagaccuccaggucucguagacctt

SEQ ID NO: 1966 - RNA, 30 nt, Artificial Sequence
  Description of Artificial Sequence: Target Sequence/siNA STRAND region (stab0)
ggucuacgagaccucgaggucucguagacc

SEQ ID NO: 1967 - DNA, 32 bp, Artificial Sequence
  Description of Artificial Sequence: Target Sequence/siNA STRAND region (stab0)
  misc_feature (1)..(30): ribonucleotide unmodified or modified as described for this sequence
ggucuacgagaccucgaggucucguagacctt

SEQ ID NO: 1968 - RNA, 30 nt, Artificial Sequence
  Description of Artificial Sequence: Target Sequence/siNA STRAND region (stab0)
ggucuacgagaccugcaggucucguagacc

SEQ ID NO: 1969 - DNA, 32 bp, Artificial Sequence
  Description of Artificial Sequence: Target Sequence/siNA STRAND region (stab0)
  misc_feature (1)..(30): ribonucleotide unmodified or modified as described for this sequence
ggucuacgagaccugcaggucucguagacctt

SEQ ID NO: 1970 - DNA, 40 bp, Artificial Sequence
  Description of Artificial Sequence: Target Sequence/siNA STRAND region (stab0)
  misc_feature (1)..(38): ribonucleotide unmodified or modified as described for this sequence
gacuaucccacgaacgcucgagcguucgugggauaguctt

SEQ ID NO: 1971 - RNA, 38 nt, Artificial Sequence
  Description of Artificial Sequence: Target Sequence/siNA STRAND region (stab0)
gacuaucccacgaacgcucgagcguucgugggauaguc

SEQ ID NO: 1972 - DNA, 34 bp, Artificial Sequence
  Description of Artificial Sequence: Target Sequence/siNA STRAND region (stab0)
  misc_feature (1)..(32): ribonucleotide unmodified or modified as described for this sequence
gacuaucccacgaacgcguucgugggauaguctt

SEQ ID NO: 1973 - RNA, 32 nt, Artificial Sequence
  Description of Artificial Sequence: Target Sequence/siNA STRAND region (stab0)
gacuaucccacgaacgcguucgugggauaguc

SEQ ID NO: 1974 - DNA, 32 bp, Artificial Sequence
  Description of Artificial Sequence: Target Sequence/siNA STRAND region (stab0)
  misc_feature (1)..(30): ribonucleotide unmodified or modified as described for this sequence
gacuaucccacgaacguucgugggauaguctt

SEQ ID NO: 1975 - RNA, 30 nt, Artificial Sequence
  Description of Artificial Sequence: Target Sequence/siNA STRAND region (stab0)
gacuaucccacgaacguucgugggauaguc

SEQ ID NO: 1976 - DNA, 30 bp, Artificial Sequence
  Description of Artificial Sequence: Target Sequence/siNA STRAND region (stab0)
  misc_feature (1)..(28): ribonucleotide unmodified or modified as described for this sequence
acuaucccacgaacguucgugggauagutt

SEQ ID NO: 1977 - RNA, 24 nt, Artificial Sequence
  Description of Artificial Sequence: Target Sequence/siNA STRAND region (stab0)
acuaucccacgaacguucguggga

SEQ ID NO: 1978 - DNA, 42 bp, Artificial Sequence
  Description of Artificial Sequence: Target Sequence/siNA sense region (stab00)
  misc_feature (21)..(21): hexethelyne glycol spacer (language)
  misc_feature (1)..(40): ribonucleotide unmodified or modified as described for this sequence
ccgggaggucucguagaccttgcgaaaggccuugugguactt

SEQ ID NO: 1979 - DNA, 42 bp, Artificial Sequence
  Description of Artificial Sequence: Target Sequence/siNA sense region (stab00)
  misc_feature (21)..(21): hexethelyne glycol spacer (language)
  misc_feature (1)..(40): ribonucleotide unmodified or modified as described for this sequence
ccgggaggucucguagaccttauagggugcuugcgagugctt

SEQ ID NO: 1980 - DNA, 42 bp, Artificial Sequence
  Description of Artificial Sequence: Target Sequence/siNA sense region (stab00)
  misc_feature (21)..(21): hexethelyne glycol spacer (language)
  misc_feature (1)..(40): ribonucleotide unmodified or modified as described for this sequence
auagggugcuugcgagugcttgcgaaaggccuugugguactt

SEQ ID NO: 1981 - DNA, 21 bp, Artificial Sequence
  Description of Artificial Sequence: Target Sequence/siNA sense region (stab09)
  misc_feature (1)..(1): 5'-3 attached terminal deoxyabasic moiety, inverted abasic, inverted nucleotide or other terminal cap that is optionally present
  misc_feature (21)..(21): 3'-3 attached terminal deoxyabasic moiety, inverted abasic, inverted nucleotide or other terminal cap that is optionally present
  misc_feature (1)..(19): ribonucleotide unmodified or modified as described for this sequence
cugauagggugcuugcgagtt

SEQ ID NO: 1982 - DNA, 21 bp, Artificial Sequence
  Description of Artificial Sequence: Target Sequence/siNA antisense region (stab10)
  misc_feature (20)..(20): Phosphorothioate or Phosphorodithioate 3'-Internucleotide Linkage (optionally present)
  misc_feature (1)..(19): ribonucleotide unmodified or modified as described for this sequence
cucgcaagcacccuaucagtt

SEQ ID NO: 1983 - DNA, 21 bp, Artificial Sequence
  Description of Artificial Sequence: Target Sequence/siNA sense region (stab04)
  misc_feature (1)..(1): 5'-3 attached terminal deoxyabasic moiety, inverted abasic, inverted nucleotide or other terminal cap that is optionally present
  misc_feature (21)..(21): 3'-3 attached terminal deoxyabasic moiety, inverted abasic, inverted nucleotide or other terminal cap that is optionally present
  misc_feature (1)..(2): 2'-deoxy-2'Fluoro
  misc_feature (5)..(5): 2'-deoxy-2'Fluoro
  misc_feature (10)..(10): 2'-deoxy-2'Fluoro
  misc_feature (12)..(14): 2'-deoxy-2'Fluoro
  misc_feature (16)..(16): 2'-deoxy-2'Fluoro
  misc_feature (1)..(19): ribonucleotide unmodified or modified as described for this sequence
cugauagggugcuugcgagtt

SEQ ID NO: 1984 - DNA, 21 bp, Artificial Sequence
  Description of Artificial Sequence: Target Sequence/siNA antisense region (stab05)
  misc_feature (20)..(20): Phosphorothioate or Phosphorodithioate 3'-Internucleotide Linkage (optionally present)
  misc_feature (1)..(3): 2'-deoxy-2'Fluoro
  misc_feature (5)..(5): 2'-deoxy-2'Fluoro
  misc_feature (9)..(9): 2'-deoxy-2'Fluoro
  misc_feature (11)..(14): 2'-deoxy-2'Fluoro
  misc_feature (16)..(17): 2'-deoxy-2'Fluoro
  misc_feature (1)..(19): ribonucleotide unmodified or modified as described for this sequence
cucgcaagcacccuaucagtt

SEQ ID NO: 1985 - DNA, 42 bp, Artificial Sequence; identical to SEQ ID NO: 1979
  Description of Artificial Sequence: Target Sequence/siNA sense region (stab07)
  misc_feature (1)..(1): 5'-3 attached terminal deoxyabasic moiety, inverted abasic, inverted nucleotide or other terminal cap that is optionally present
  misc_feature (42)..(42): 3'-3 attached terminal deoxyabasic moiety, inverted abasic, inverted nucleotide or other terminal cap that is optionally present
  misc_feature (1)..(2): 2'-deoxy-2'Fluoro
  misc_feature (3)..(8): 2'-deoxy
  misc_feature (9)..(12): 2'-deoxy-2'Fluoro
  misc_feature (13)..(13): 2'-deoxy
  misc_feature (14)..(14): 2'-deoxy-2'Fluoro
  misc_feature (15)..(17): 2'-deoxy
  misc_feature (18)..(19): 2'-deoxy-2'Fluoro
  misc_feature (21)..(21): hexethelyne glycol spacer (language)
  misc_feature (23)..(23): 2'-deoxy-2'Fluoro
  misc_feature (28)..(28): 2'-deoxy-2'Fluoro
  misc_feature (30)..(32): 2'-deoxy-2'Fluoro
  misc_feature (34)..(34): 2'-deoxy-2'Fluoro
  misc_feature (38)..(38): 2'-deoxy-2'Fluoro
  misc_feature (40)..(40): 2'-deoxy-2'Fluoro
  misc_feature (1)..(40): ribonucleotide unmodified or modified as described for this sequence

SEQ ID NO: 1986 - DNA, 21 bp, Artificial Sequence
  Description of Artificial Sequence: Target Sequence/siNA antisense region (stab26)
  misc_feature (3)..(3): 2'-O-methyl
  misc_feature (4)..(6): 2'-deoxy-2'Fluoro
  misc_feature (7)..(7): 2'-O-methyl
  misc_feature (8)..(8): 2'-deoxy-2'Fluoro
  misc_feature (9)..(11): 2'-O-methyl
  misc_feature (12)..(12): 2'-deoxy-2'Fluoro
  misc_feature (13)..(13): 2'-O-methyl
  misc_feature (14)..(17): 2'-deoxy-2'Fluoro
  misc_feature (18)..(18): 2'-O-methyl
  misc_feature (19)..(19): 2'-deoxy-2'Fluoro
  misc_feature (1)..(19): ribonucleotide unmodified or modified as described for this sequence
gcacucgcaagcacccuautt

SEQ ID NO: 1987 - DNA, 21 bp, Artificial Sequence
  Description of Artificial Sequence: Target Sequence/siNA antisense region (stab26)
  misc_feature (4)..(5): 2'-deoxy-2'Fluoro
  misc_feature (6)..(6): 2'-O-methyl
  misc_feature (7)..(7): 2'-deoxy-2'Fluoro
  misc_feature (8)..(11): 2'-O-methyl
  misc_feature (12)..(17): 2'-deoxy-2'Fluoro
  misc_feature (18)..(19): 2'-O-methyl
  misc_feature (1)..(19): ribonucleotide unmodified or modified as described for this sequence
ggucuacgagaccucccggtt

SEQ ID NO: 1988 - DNA, 21 bp, Artificial Sequence
  Description of Artificial Sequence: Target Sequence/siNA antisense region (stab25)
  misc_feature (20)..(20): Phosphorothioate or Phosphorodithioate 3'-Internucleotide Linkage (optionally present)
  misc_feature (3)..(3): 2'-O-methyl
  misc_feature (4)..(5): 2'-deoxy-2'Fluoro
  misc_feature (6)..(6): 2'-O-methyl
  misc_feature (7)..(7): 2'-deoxy-2'Fluoro
  misc_feature (8)..(11): 2'-O-methyl
  misc_feature (12)..(17): 2'-deoxy-2'Fluoro
  misc_feature (18)..(18): 2'-O-methyl
  misc_feature (19)..(19): 2'-deoxy-2'Fluoro
  misc_feature (1)..(19): ribonucleotide unmodified or modified as described for this sequence
guaccacaaggccuuucgctt

SEQ ID NO: 1989 - DNA, 21 bp, Artificial Sequence
  Description of Artificial Sequence: Target Sequence/siNA antisense region (stab25)
  misc_feature (20)..(20): Phosphorothioate or Phosphorodithioate 3'-Internucleotide Linkage (optionally present)
  misc_feature (4)..(4): 2'-O-methyl
  misc_feature (5)..(6): 2'-deoxy-2'Fluoro
  misc_feature (7)..(7): 2'-O-methyl
  misc_feature (8)..(8): 2'-deoxy-2'Fluoro
  misc_feature (9)..(12): 2'-O-methyl
  misc_feature (13)..(18): 2'-deoxy-2'Fluoro
  misc_feature (19)..(19): 2'-O-methyl
  misc_feature (1)..(19): ribonucleotide unmodified or modified as described for this sequence
aguaccacaaggccuuucgtt

SEQ ID NO: 1990 - DNA, 21 bp, Artificial Sequence
  Description of Artificial Sequence: Target Sequence/siNA antisense region (stab25)
  misc_feature (20)..(20): Phosphorothioate or Phosphorodithioate 3'-Internucleotide Linkage (optionally present)
  misc_feature (3)..(3): 2'-O-methyl
  misc_feature (4)..(6): 2'-deoxy-2'Fluoro
  misc_feature (7)..(7): 2'-O-methyl
  misc_feature (8)..(8): 2'-deoxy-2'Fluoro
  misc_feature (9)..(11): 2'-O-methyl
  misc_feature (12)..(12): 2'-deoxy-2'Fluoro
  misc_feature (13)..(13): 2'-O-methyl
  misc_feature (14)..(17): 2'-deoxy-2'Fluoro
  misc_feature (18)..(18): 2'-O-methyl
  misc_feature (19)..(19): 2'-deoxy-2'Fluoro
  misc_feature (1)..(19): ribonucleotide unmodified or modified as described for this sequence
gcacucgcaagcacccuautt

SEQ ID NO: 1991 - DNA, 21 bp, Artificial Sequence
  Description of Artificial Sequence: Target Sequence/siNA antisense region (stab26)
  misc_feature (4)..(4): 2'-O-methyl
  misc_feature (5)..(5): 2'-deoxy-2'Fluoro
  misc_feature (6)..(8): 2'-O-methyl
  misc_feature (9)..(9): 2'-deoxy-2'Fluoro
  misc_feature (10)..(10): 2'-O-methyl
  misc_feature (11)..(14): 2'-deoxy-2'Fluoro
  misc_feature (15)..(15): 2'-O-methyl
  misc_feature (16)..(17): 2'-deoxy-2'Fluoro
  misc_feature (18)..(19): 2'-O-methyl
  misc_feature (1)..(19): ribonucleotide unmodified or modified as described for this sequence
cucgcaagcacccuaucagtt

SEQ ID NO: 1992 - DNA, 21 bp, Artificial Sequence
  Description of Artificial Sequence: Target Sequence/siNA antisense region (stab27)
  misc_feature (21)..(21): 3'-3 attached terminal deoxyabasic moiety, inverted abasic, inverted nucleotide or other terminal cap that is optionally present
  misc_feature (4)..(4): 2'-O-methyl
  misc_feature (5)..(5): 2'-deoxy-2'Fluoro
  misc_feature (6)..(8): 2'-O-methyl
  misc_feature (9)..(9): 2'-deoxy-2'Fluoro
  misc_feature (10)..(10): 2'-O-methyl
  misc_feature (11)..(14): 2'-deoxy-2'Fluoro
  misc_feature (15)..(15): 2'-O-methyl
  misc_feature (16)..(17): 2'-deoxy-2'Fluoro
  misc_feature (18)..(19): 2'-O-methyl
  misc_feature (1)..(19): ribonucleotide unmodified or modified as described for this sequence
cucgcaagcacccuaucagtt

SEQ ID NO: 1993 - DNA, 21 bp, Artificial Sequence
  Description of Artificial Sequence: Target Sequence/siNA antisense region (stab19)
  misc_feature (21)..(21): 3'-3 attached terminal deoxyabasic moiety, inverted abasic, inverted nucleotide or other terminal cap that is optionally present
  misc_feature (2)..(2): 2'-deoxy-2'Fluoro
  misc_feature (3)..(3): 2'-O-methyl
  misc_feature (4)..(5): 2'-deoxy-2'Fluoro
  misc_feature (6)..(6): 2'-O-methyl
  misc_feature (7)..(7): 2'-deoxy-2'Fluoro
  misc_feature (8)..(11): 2'-O-methyl
  misc_feature (12)..(17): 2'-deoxy-2'Fluoro
  misc_feature (18)..(18): 2'-O-methyl
  misc_feature (19)..(19): 2'-deoxy-2'Fluoro
  misc_feature (1)..(19): ribonucleotide unmodified or modified as described for this sequence
guaccacaaggccuuucgctt

SEQ ID NO: 1994 - DNA, 21 bp, Artificial Sequence
  Description of Artificial Sequence: Target Sequence/siNA antisense region (stab26)
  misc_feature (3)..(3): 2'-O-methyl
  misc_feature (4)..(5): 2'-deoxy-2'Fluoro
  misc_feature (6)..(6): 2'-O-methyl
  misc_feature (7)..(7): 2'-deoxy-2'Fluoro
  misc_feature (8)..(11): 2'-O-methyl
  misc_feature (12)..(17): 2'-deoxy-2'Fluoro
  misc_feature (18)..(18): 2'-O-methyl
  misc_feature (19)..(19): 2'-deoxy-2'Fluoro
  misc_feature (1)..(19): ribonucleotide unmodified or modified as described for this sequence
guaccacaaggccuuucgctt

SEQ ID NO: 1995 - DNA, 21 bp, Artificial Sequence
  Description of Artificial Sequence: Target Sequence/siNA antisense region (stab27)
  misc_feature (21)..(21): 3'-3 attached terminal deoxyabasic moiety, inverted abasic, inverted nucleotide or other terminal cap that is optionally present
  misc_feature (3)..(3): 2'-O-methyl
  misc_feature (4)..(5): 2'-deoxy-2'Fluoro
  misc_feature (6)..(6): 2'-O-methyl
  misc_feature (7)..(7): 2'-deoxy-2'Fluoro
  misc_feature (8)..(11): 2'-O-methyl
  misc_feature (12)..(17): 2'-deoxy-2'Fluoro
  misc_feature (18)..(18): 2'-O-methyl
  misc_feature (19)..(19): 2'-deoxy-2'Fluoro
  misc_feature (1)..(19): ribonucleotide unmodified or modified as described for this sequence
guaccacaaggccuuucgctt

SEQ ID NO: 1996 - DNA, 21 bp, Artificial Sequence
  Description of Artificial Sequence: Target Sequence/siNA antisense region (stab29)
  misc_feature (20)..(20): Phosphorothioate or Phosphorodithioate 3'-Internucleotide Linkage (optionally present)
  misc_feature (2)..(2): 2'-deoxy-2'Fluoro
  misc_feature (3)..(3): 2'-O-methyl
  misc_feature (4)..(5): 2'-deoxy-2'Fluoro
  misc_feature (6)..(6): 2'-O-methyl
  misc_feature (7)..(7): 2'-deoxy-2'Fluoro
  misc_feature (8)..(11): 2'-O-methyl
  misc_feature (12)..(17): 2'-deoxy-2'Fluoro
  misc_feature (18)..(18): 2'-O-methyl
  misc_feature (19)..(19): 2'-deoxy-2'Fluoro
  misc_feature (1)..(19): ribonucleotide unmodified or modified as described for this sequence
guaccacaaggccuuucgctt

SEQ ID NO: 1997 - DNA, 21 bp, Artificial Sequence
  Description of Artificial Sequence: Target Sequence/siNA antisense region (stab30)
  misc_feature (2)..(2): 2'-deoxy-2'Fluoro
  misc_feature (3)..(3): 2'-O-methyl
  misc_feature (4)..(5): 2'-deoxy-2'Fluoro
  misc_feature (6)..(6): 2'-O-methyl
  misc_feature (7)..(7): 2'-deoxy-2'Fluoro
  misc_feature (8)..(11): 2'-O-methyl
  misc_feature (12)..(17): 2'-deoxy-2'Fluoro
  misc_feature (18)..(18): 2'-O-methyl
  misc_feature (19)..(19): 2'-deoxy-2'Fluoro
  misc_feature (1)..(19): ribonucleotide unmodified or modified as described for this sequence
guaccacaaggccuuucgctt

SEQ ID NO: 1998 - DNA, 21 bp, Artificial Sequence
  Description of Artificial Sequence: Target Sequence/siNA antisense region (stab31)
  misc_feature (21)..(21): 3'-3 attached terminal deoxyabasic moiety, inverted abasic, inverted nucleotide or other terminal cap that is optionally present
  misc_feature (2)..(2): 2'-deoxy-2'Fluoro
  misc_feature (3)..(3): 2'-O-methyl
  misc_feature (4)..(5): 2'-deoxy-2'Fluoro
  misc_feature (6)..(6): 2'-O-methyl
  misc_feature (7)..(7): 2'-deoxy-2'Fluoro
  misc_feature (8)..(11): 2'-O-methyl
  misc_feature (12)..(17): 2'-deoxy-2'Fluoro
  misc_feature (18)..(18): 2'-O-methyl
  misc_feature (19)..(19): 2'-deoxy-2'Fluoro
  misc_feature (1)..(19): ribonucleotide unmodified or modified as described for this sequence
guaccacaaggccuuucgctt

SEQ ID NO: 1999 - DNA, 21 bp, Artificial Sequence
  Description of Artificial Sequence: Target Sequence/siNA antisense region (stab32)
  misc_feature (2)..(2): 2'-deoxy-2'Fluoro
  misc_feature (3)..(3): 2'-O-methyl
  misc_feature (4)..(5): 2'-deoxy-2'Fluoro
  misc_feature (6)..(6): 2'-O-methyl
  misc_feature (7)..(7): 2'-deoxy-2'Fluoro
  misc_feature (8)..(11): 2'-O-methyl
  misc_feature (12)..(17): 2'-deoxy-2'Fluoro
  misc_feature (18)..(18): 2'-O-methyl
  misc_feature (19)..(19): 2'-deoxy-2'Fluoro
  misc_feature (1)..(19): ribonucleotide unmodified or modified as described for this sequence
guaccacaaggccuuucgctt

SEQ ID NO: 2000 - DNA, 21 bp, Artificial Sequence
  Description of Artificial Sequence: Target Sequence/siNA antisense region (stab32)
  misc_feature (1)..(3): 2'-deoxy-2'Fluoro
  misc_feature (4)..(4): 2'-O-methyl
  misc_feature (5)..(5): 2'-deoxy-2'Fluoro
  misc_feature (6)..(8): 2'-O-methyl
  misc_feature (9)..(9): 2'-deoxy-2'Fluoro
  misc_feature (10)..(10): 2'-O-methyl
  misc_feature (11)..(14): 2'-deoxy-2'Fluoro
  misc_feature (15)..(15): 2'-O-methyl
  misc_feature (16)..(17): 2'-deoxy-2'Fluoro
  misc_feature (18)..(19): 2'-O-methyl
  misc_feature (1)..(19): ribonucleotide unmodified or modified as described for this sequence
cucgcaagcacccuaucagtt

SEQ ID NO: 2001 - DNA, 21 bp, Artificial Sequence
  Description of Artificial Sequence: Target Sequence/siNA antisense region (stab27)
  misc_feature (21)..(21): 3'-3 attached terminal deoxyabasic moiety, inverted abasic, inverted nucleotide or other terminal cap that is optionally present
  misc_feature (4)..(5): 2'-deoxy-2'Fluoro
  misc_feature (6)..(6): 2'-O-methyl
  misc_feature (7)..(7): 2'-deoxy-2'Fluoro
  misc_feature (8)..(11): 2'-O-methyl
  misc_feature (12)..(17): 2'-deoxy-2'Fluoro
  misc_feature (18)..(19): 2'-O-methyl
  misc_feature (1)..(19): ribonucleotide unmodified or modified as described for this sequence
ggucuacgagaccucccggtt

SEQ ID NO: 2002 - DNA, 21 bp, Artificial Sequence
  Description of Artificial Sequence: Target Sequence/siNA antisense region (stab30)
  misc_feature (3)..(5): 2'-deoxy-2'Fluoro
  misc_feature (6)..(6): 2'-O-methyl
  misc_feature (7)..(7): 2'-deoxy-2'Fluoro
  misc_feature (8)..(11): 2'-O-methyl
  misc_feature (12)..(17): 2'-deoxy-2'Fluoro
  misc_feature (18)..(19): 2'-O-methyl
  misc_feature (1)..(19): ribonucleotide unmodified or modified as described for this sequence
ggucuacgagaccucccggtt

SEQ ID NO: 2003 - DNA, 21 bp, Artificial Sequence
  Description of Artificial Sequence: Target Sequence/siNA antisense region (stab31)
  misc_feature (21)..(21): 3'-3 attached terminal deoxyabasic moiety, inverted abasic, inverted nucleotide or other terminal cap that is optionally present
  misc_feature (3)..(5): 2'-deoxy-2'Fluoro
  misc_feature (6)..(6): 2'-O-methyl
  misc_feature (7)..(7): 2'-deoxy-2'Fluoro
  misc_feature (8)..(11): 2'-O-methyl
  misc_feature (12)..(17): 2'-deoxy-2'Fluoro
  misc_feature (18)..(19): 2'-O-methyl
  misc_feature (1)..(19): ribonucleotide unmodified or modified as described for this sequence
ggucuacgagaccucccggtt

SEQ ID NO: 2004 - DNA, 21 bp, Artificial Sequence
  Description of Artificial Sequence: Target Sequence/siNA antisense region (stab32)
  misc_feature (3)..(5): 2'-deoxy-2'Fluoro
  misc_feature (6)..(6): 2'-O-methyl
  misc_feature (7)..(7): 2'-deoxy-2'Fluoro
  misc_feature (8)..(11): 2'-O-methyl
  misc_feature (12)..(17): 2'-deoxy-2'Fluoro
  misc_feature (18)..(19): 2'-O-methyl
  misc_feature (1)..(19): ribonucleotide unmodified or modified as described for this sequence
ggucuacgagaccucccggtt

SEQ ID NO: 2005 - DNA, 42 bp, Artificial Sequence
  Description of Artificial Sequence: Target Sequence/siNA sense region (stab00)
  misc_feature (21)..(21): hexethelyne glycol spacer
  misc_feature (1)..(40): ribonucleotide unmodified or modified as described for this sequence
ccgggaggucucguagaccttcugauagggugcuugcgagtt

SEQ ID NO: 2006 - DNA, 42 bp, Artificial Sequence
  Description of Artificial Sequence: Target Sequence/siNA sense region (stab00)
  misc_feature (21)..(21): hexethelyne glycol spacer
  misc_feature (1)..(40): ribonucleotide unmodified or modified as described for this sequence
cugauagggugcuugcgagttgcgaaaggccuugugguactt

SEQ ID NO: 2007 - DNA, 42 bp, Artificial Sequence; identical to SEQ ID NO: 2005
  Description of Artificial Sequence: Target Sequence/siNA sense region (stab07)
  misc_feature (1)..(1): 5'-3 attached terminal deoxyabasic moiety, inverted abasic, inverted nucleotide or other terminal cap that is optionally present
  misc_feature (42)..(42): 3'-3 attached terminal deoxyabasic moiety, inverted abasic, inverted nucleotide or other terminal cap that is optionally present
  misc_feature (1)..(2): 2'-deoxy-2'Fluoro
  misc_feature (3)..(8): 2'-deoxy
  misc_feature (9)..(12): 2'-deoxy-2'Fluoro
  misc_feature (13)..(13): 2'-deoxy
  misc_feature (14)..(14): 2'-deoxy-2'Fluoro
  misc_feature (15)..(17): 2'-deoxy
  misc_feature (18)..(19): 2'-deoxy-2'Fluoro
  misc_feature (21)..(21): hexethelyne glycol spacer
  misc_feature (22)..(23): 2'-deoxy-2'Fluoro
  misc_feature (24)..(25): 2'-deoxy
  misc_feature (26)..(26): 2'-deoxy-2'Fluoro
  misc_feature (27)..(30): 2'-deoxy
  misc_feature (31)..(31): 2'-deoxy-2'Fluoro
  misc_feature (32)..(32): 2'-deoxy
  misc_feature (33)..(35): 2'-deoxy-2'Fluoro
  misc_feature (36)..(36): 2'-deoxy
  misc_feature (37)..(37): 2'-deoxy-2'Fluoro
  misc_feature (38)..(40): 2'-deoxy
  misc_feature (1)..(40): ribonucleotide unmodified or modified as described for this sequence

SEQ ID NO: 2008 - DNA, 42 bp, Artificial Sequence; identical to SEQ ID NO: 1978
  Description of Artificial Sequence: Target Sequence/siNA sense region (stab07)
  misc_feature (1)..(1): 5'-3 attached terminal deoxyabasic moiety, inverted abasic, inverted nucleotide or other terminal cap that is optionally present
  misc_feature (42)..(42): 3'-3 attached terminal deoxyabasic moiety, inverted abasic, inverted nucleotide or other terminal cap that is optionally present
  misc_feature (1)..(2): 2'-deoxy-2'Fluoro
  misc_feature (3)..(8): 2'-deoxy
  misc_feature (9)..(12): 2'-deoxy-2'Fluoro
  misc_feature (13)..(13): 2'-deoxy
  misc_feature (14)..(14): 2'-deoxy-2'Fluoro
  misc_feature (15)..(17): 2'-deoxy
  misc_feature (18)..(19): 2'-deoxy-2'Fluoro
  misc_feature (21)..(21): hexethelyne glycol spacer
  misc_feature (22)..(22): 2'-deoxy
  misc_feature (23)..(23): 2'-deoxy-2'Fluoro
  misc_feature (24)..(29): 2'-deoxy
  misc_feature (30)..(33): 2'-deoxy-2'Fluoro
  misc_feature (34)..(34): 2'-deoxy
  misc_feature (35)..(35): 2'-deoxy-2'Fluoro
  misc_feature (36)..(37): 2'-deoxy
  misc_feature (38)..(38): 2'-deoxy-2'Fluoro
  misc_feature (39)..(39): 2'-deoxy
  misc_feature (40)..(40): 2'-deoxy-2'Fluoro
  misc_feature (1)..(40): ribonucleotide unmodified or modified as described for this sequence

SEQ ID NO: 2009 - DNA, 42 bp, Artificial Sequence; identical to SEQ ID NO: 2006
  Description of Artificial Sequence: Target Sequence/siNA sense region (stab07)
  misc_feature (1)..(1): 5'-3 attached terminal deoxyabasic moiety, inverted abasic, inverted nucleotide or other terminal cap that is optionally present
  misc_feature (42)..(42): 3'-3 attached terminal deoxyabasic moiety, inverted abasic, inverted nucleotide or other terminal cap that is optionally present
  misc_feature (1)..(2): 2'-deoxy-2'Fluoro
  misc_feature (3)..(4): 2'-deoxy
  misc_feature (5)..(5): 2'-deoxy-2'Fluoro
  misc_feature (6)..(9): 2'-deoxy
  misc_feature (10)..(10): 2'-deoxy-2'Fluoro
  misc_feature (11)..(11): 2'-deoxy
  misc_feature (12)..(14): 2'-deoxy-2'Fluoro
  misc_feature (15)..(15): 2'-deoxy
  misc_feature (16)..(16): 2'-deoxy-2'Fluoro
  misc_feature (17)..(19): 2'-deoxy
  misc_feature (21)..(21): hexethelyne glycol spacer
  misc_feature (22)..(22): 2'-deoxy
  misc_feature (23)..(23): 2'-deoxy-2'Fluoro
  misc_feature (24)..(29): 2'-deoxy
  misc_feature (30)..(33): 2'-deoxy-2'Fluoro
  misc_feature (34)..(34): 2'-deoxy
  misc_feature (35)..(35): 2'-deoxy-2'Fluoro
  misc_feature (36)..(37): 2'-deoxy
  misc_feature (38)..(38): 2'-deoxy-2'Fluoro
  misc_feature (39)..(39): 2'-deoxy
  misc_feature (40)..(40): 2'-deoxy-2'Fluoro
  misc_feature (1)..(40): ribonucleotide unmodified or modified as described for this sequence

SEQ ID NO: 2010 - RNA, 21 nt, Artificial Sequence
  Description of Artificial Sequence: Target Sequence/siNA antisense region (stab26)
  misc_feature (4)..(4): 2'-O-methyl
  misc_feature (5)..(5): 2'-deoxy-2'Fluoro
  misc_feature (6)..(8): 2'-O-methyl
  misc_feature (9)..(9): 2'-deoxy-2'Fluoro
  misc_feature (10)..(10): 2'-O-methyl
  misc_feature (11)..(14): 2'-deoxy-2'Fluoro
  misc_feature (15)..(15): 2'-O-methyl
  misc_feature (16)..(17): 2'-deoxy-2'Fluoro
  misc_feature (18)..(21): 2'-O-methyl
  misc_feature (1)..(21): ribonucleotide unmodified or modified as described for this sequence
cucgcaagcacccuaucaguu

SEQ ID NO: 2011 - RNA, 21 nt, Artificial Sequence
  Description of Artificial Sequence: Target Sequence/siNA antisense region (stab26)
  misc_feature (4)..(5): 2'-deoxy-2'Fluoro
  misc_feature (6)..(6): 2'-O-methyl
  misc_feature (7)..(7): 2'-deoxy-2'Fluoro
  misc_feature (8)..(11): 2'-O-methyl
  misc_feature (12)..(17): 2'-deoxy-2'Fluoro
  misc_feature (18)..(21): 2'-O-methyl
  misc_feature (1)..(21): ribonucleotide unmodified or modified as described for this sequence
ggucuacgagaccucccgguu

SEQ ID NO: 2012 - RNA, 21 nt, Artificial Sequence
  Description of Artificial Sequence: Target Sequence/siNA antisense region (stab26)
  misc_feature (4)..(4): 2'-O-methyl
  misc_feature (5)..(5): 2'-deoxy-2'Fluoro
  misc_feature (6)..(8): 2'-O-methyl
  misc_feature (9)..(9): 2'-deoxy-2'Fluoro
  misc_feature (10)..(10): 2'-O-methyl
  misc_feature (11)..(14): 2'-deoxy-2'Fluoro
  misc_feature (15)..(15): 2'-O-methyl
  misc_feature (16)..(17): 2'-deoxy-2'Fluoro
  misc_feature (18)..(21): 2'-O-methyl
  misc_feature (1)..(21): ribonucleotide unmodified or modified as described for this sequence
cucgcaagcacccuaucaggc

SEQ ID NO: 2013 - RNA, 21 nt, Artificial Sequence
  Description of Artificial Sequence: Target Sequence/siNA antisense region (stab26)
  misc_feature (4)..(5): 2'-deoxy-2'Fluoro
  misc_feature (6)..(6): 2'-O-methyl
  misc_feature (7)..(7): 2'-deoxy-2'Fluoro
  misc_feature (8)..(11): 2'-O-methyl
  misc_feature (12)..(17): 2'-deoxy-2'Fluoro
  misc_feature (18)..(21): 2'-O-methyl
  misc_feature (1)..(21): ribonucleotide unmodified or modified as described for this sequence
ggucuacgagaccucccgggc

SEQ ID NO: 2014 - RNA, 19 nt, Artificial Sequence
  Description of Artificial Sequence: Target Sequence/siNA sense region
cugauagggcgcuugcgag

SEQ ID NO: 2015 - RNA, 18 nt, Artificial Sequence
  Description of Artificial Sequence: Target Sequence/siNA sense region
ugauagggugcuugcgag

SEQ ID NO: 2016 - RNA, 19 nt, Artificial Sequence
  Description of Artificial Sequence: Target Sequence/siNA sense region
aacugauagggugcuugcg

SEQ ID NO: 2017 - RNA, 23 nt, Artificial Sequence
  Description of Artificial Sequence: Target Sequence/siNA sense region
gucuucacgcagaaagcgucuag

SEQ ID NO: 2018 - RNA, 23 nt, Artificial Sequence
  Description of Artificial Sequence: Target Sequence/siNA sense region
aagcgucuagccauggcguuagu

SEQ ID NO: 2019 - RNA, 23 nt, Artificial Sequence
  Description of Artificial Sequence: Target Sequence/siNA sense region
gugaguacaccggaauugccagg

SEQ ID NO: 2020 - RNA, 23 nt, Artificial Sequence
  Description of Artificial Sequence: Target Sequence/siNA sense region
acgaccggguccuuucuuggauc

SEQ ID NO: 2021 - RNA, 23 nt, Artificial Sequence
  Description of Artificial Sequence: Target Sequence/siNA sense region
cccgcucaaugccuggagauuug

SEQ ID NO: 2022 - RNA, 23 nt, Artificial Sequence
  Description of Artificial Sequence: Target Sequence/siNA sense region
ccccgcgagacugcuagccgagu

SEQ ID NO: 2023 - RNA, 23 nt, Artificial Sequence
  Description of Artificial Sequence: Target Sequence/siNA sense region
ccgcgagacugcuagccgaguag

SEQ ID NO: 2024 - RNA, 23 nt, Artificial Sequence
  Description of Artificial Sequence: Target Sequence/siNA sense region
ccgaguaguguugggucgcgaaa

SEQ ID NO: 2025 - RNA, 23 nt, Artificial Sequence
  Description of Artificial Sequence: Target Sequence/siNA sense region
guguugggucgcgaaaggccuug

SEQ ID NO: 2026 - RNA, 23 nt, Artificial Sequence
  Description of Artificial Sequence: Target Sequence/siNA sense region
uugggucgcgaaaggccuugugg

SEQ ID NO: 2027 - RNA, 19 nt, Artificial Sequence
  Description of Artificial Sequence: Target Sequence/siNA sense region
gaaaggauuuggcuacaaa

SEQ ID NO: 2028 - RNA, 19 nt, Artificial Sequence
  Description of Artificial Sequence: Target Sequence/siNA sense region
aaggauuuggcuacaaaaa

SEQ ID NO: 2029 - RNA, 19 nt, Artificial Sequence
  Description of Artificial Sequence: Target Sequence/siNA sense region
aaggacuucaugauccagg

SEQ ID NO: 2030 - RNA, 19 nt, Artificial Sequence
  Description of Artificial Sequence: Target Sequence/siNA sense region
gagagcaccaagacagaca

SEQ ID NO: 2031 - RNA, 19 nt, Artificial Sequence
  Description of Artificial Sequence: Target Sequence/siNA sense region
aaagacuguuccaaaaaca

SEQ ID NO: 2032 - RNA, 19 nt, Artificial Sequence
  Description of Artificial Sequence: Target Sequence/siNA sense region
agauggcacaggaggaaag

SEQ ID NO: 2033 - RNA, 19 nt, Artificial Sequence
  Description of Artificial Sequence: Target Sequence/siNA sense region
cugauagggugcuugcgag

SEQ ID NO: 2034 - DNA, 21 bp, Artificial Sequence
  Description of Artificial Sequence: Target Sequence/siNA sense region (stab07)
  misc_feature (1)..(1): 5'-3 attached terminal deoxyabasic moiety, inverted abasic, inverted nucleotide or other terminal cap that is optionally present
  misc_feature (21)..(21): 3'-3 attached terminal deoxyabasic moiety, inverted abasic, inverted nucleotide or other terminal cap that is optionally present
  misc_feature (1)..(2): 2'-deoxy-2'Fluoro
  misc_feature (3)..(4): 2'-deoxy
  misc_feature (5)..(5): 2'-deoxy-2'Fluoro
  misc_feature (6)..(9): 2'-deoxy
  misc_feature (10)..(10): 2'-deoxy-2'Fluoro
  misc_feature (11)..(11): 2'-deoxy
  misc_feature (12)..(14): 2'-deoxy-2'Fluoro
  misc_feature (15)..(15): 2'-deoxy
  misc_feature (16)..(16): 2'-deoxy-2'Fluoro
  misc_feature (17)..(19): 2'-deoxy
  misc_feature (1)..(19): ribonucleotide unmodified or modified as described for this sequence
cugauagggcgcuugcgagtt

SEQ ID NO: 2035 - DNA, 21 bp, Artificial Sequence
  Description of Artificial Sequence: Target Sequence/siNA antisense region (stab25)
  misc_feature (20)..(20): Phosphorothioate or Phosphorodithioate 3'-Internucleotide Linkage (optionally present)
  misc_feature (4)..(4): 2'-O-methyl
  misc_feature (5)..(5): 2'-deoxy-2'Fluoro
  misc_feature (6)..(8): 2'-O-methyl
  misc_feature (9)..(9): 2'-deoxy-2'Fluoro
  misc_feature (10)..(10): 2'-O-methyl
  misc_feature (11)..(14): 2'-deoxy-2'Fluoro
  misc_feature (15)..(15): 2'-O-methyl
  misc_feature (16)..(17): 2'-deoxy-2'Fluoro
  misc_feature (18)..(19): 2'-O-methyl
  misc_feature (1)..(19): ribonucleotide unmodified or modified as described for this sequence
cucgcaagcgcccuaucagtt

SEQ ID NO: 2036 - DNA, 21 bp, Artificial Sequence
  Description of Artificial Sequence: Target Sequence/siNA sense region (stab07)
  misc_feature (1)..(1): 5'-3 attached terminal deoxyabasic moiety, inverted abasic, inverted nucleotide or other terminal cap that is optionally present
  misc_feature (21)..(21): 3'-3 attached terminal deoxyabasic moiety, inverted abasic, inverted nucleotide or other terminal cap that is optionally present
  misc_feature (1)..(2): 2'-deoxy-2'Fluoro
  misc_feature (3)..(4): 2'-deoxy
  misc_feature (5)..(5): 2'-deoxy-2'Fluoro
  misc_feature (6)..(6): 2'-deoxy
  misc_feature (7)..(9): 2'-deoxy-2'Fluoro
  misc_feature (10)..(10): 2'-deoxy
  misc_feature (11)..(11): 2'-deoxy-2'Fluoro
  misc_feature (12)..(13): 2'-deoxy
  misc_feature (14)..(14): 2'-deoxy-2'Fluoro
  misc_feature (15)..(15): 2'-deoxy
  misc_feature (16)..(16): 2'-deoxy-2'Fluoro
  misc_feature (17)..(19): 2'-deoxy
  misc_feature (1)..(19): ribonucleotide unmodified or modified as described for this sequence
cugauacccacgaugcgagtt

SEQ ID NO: 2037 - DNA, 21 bp, Artificial Sequence
  Description of Artificial Sequence: Target Sequence/siNA sense region (stab07)
  misc_feature (1)..(1): 5'-3 attached terminal deoxyabasic moiety, inverted abasic, inverted nucleotide or other terminal cap that is optionally present
  misc_feature (21)..(21): 3'-3 attached terminal deoxyabasic moiety, inverted abasic, inverted nucleotide or other terminal cap that is optionally present
  misc_feature (1)..(2): 2'-deoxy-2'Fluoro
  misc_feature (3)..(6): 2'-deoxy
  misc_feature (7)..(8): 2'-deoxy-2'Fluoro
  misc_feature (9)..(12): 2'-deoxy
  misc_feature (13)..(14): 2'-deoxy-2'Fluoro
  misc_feature (15)..(17): 2'-deoxy
  misc_feature (18)..(19): 2'-deoxy-2'Fluoro
  misc_feature (1)..(19): ribonucleotide unmodified or modified as described for this sequence
ccgggaccagagcuagacctt

SEQ ID NO: 2038 - DNA, 21 bp, Artificial Sequence
  Description of Artificial Sequence: Target Sequence/siNA sense region (stab07)
  misc_feature (1)..(1): 5'-3 attached terminal deoxyabasic moiety, inverted abasic, inverted nucleotide or other terminal cap that is optionally present
  misc_feature (21)..(21): 3'-3 attached terminal deoxyabasic moiety, inverted abasic, inverted nucleotide or other terminal cap that is optionally present
  misc_feature (1)..(1): 2'-deoxy
  misc_feature (2)..(2): 2'-deoxy-2'Fluoro
  misc_feature (3)..(6): 2'-deoxy
  misc_feature (7)..(8): 2'-deoxy-2'Fluoro
  misc_feature (9)..(12): 2'-deoxy
  misc_feature (13)..(14): 2'-deoxy-2'Fluoro
  misc_feature (15)..(16): 2'-deoxy
  misc_feature (17)..(17): 2'-deoxy-2'Fluoro
  misc_feature (18)..(18): 2'-deoxy
  misc_feature (19)..(19): 2'-deoxy-2'Fluoro
  misc_feature (1)..(19): ribonucleotide unmodified or modified as described for this sequence
gcgaaaccggaacugguactt

SEQ ID NO: 2039 - DNA, 21 bp, Artificial Sequence
  Description of Artificial Sequence: Target Sequence/siNA antisense region (stab25)
  misc_feature (20)..(20): Phosphorothioate or Phosphorodithioate 3'-Internucleotide Linkage (optionally present)
  misc_feature (4)..(4): 2'-deoxy
  misc_feature (5)..(5): 2'-deoxy-2'Fluoro
  misc_feature (6)..(6): 2'-deoxy
  misc_feature (7)..(8): 2'-deoxy-2'Fluoro
  misc_feature (9)..(9): 2'-deoxy
  misc_feature (10)..(10): 2'-deoxy-2'Fluoro
  misc_feature (11)..(13): 2'-deoxy
  misc_feature (14)..(14): 2'-deoxy-2'Fluoro
  misc_feature (15)..(15): 2'-deoxy
  misc_feature (16)..(17): 2'-deoxy-2'Fluoro
  misc_feature (18)..(19): 2'-deoxy
  misc_feature (1)..(19): ribonucleotide unmodified or modified as described for this sequence
cucgcaucguggguaucagtt

SEQ ID NO: 2040 - DNA, 21 bp, Artificial Sequence
  Description of Artificial Sequence: Target Sequence/siNA antisense region (stab25)
  misc_feature (20)..(20): Phosphorothioate or Phosphorodithioate 3'-Internucleotide Linkage (optionally present)
  misc_feature (4)..(5): 2'-deoxy-2'Fluoro
  misc_feature (6)..(7): 2'-deoxy
  misc_feature (8)..(11): 2'-deoxy-2'Fluoro
  misc_feature (12)..(13): 2'-deoxy
  misc_feature (14)..(17): 2'-deoxy-2'Fluoro
  misc_feature (18)..(19): 2'-deoxy
  misc_feature (1)..(19): ribonucleotide unmodified or modified as described for this sequence
ggucuagcucuggucccggtt

SEQ ID NO: 2041 - DNA, 21 bp, Artificial Sequence
  Description of Artificial Sequence: Target Sequence/siNA antisense region (stab25)
  misc_feature (20)..(20): Phosphorothioate or Phosphorodithioate 3'-Internucleotide Linkage (optionally present)
  misc_feature (4)..(5): 2'-deoxy-2'Fluoro
  misc_feature (6)..(7): 2'-deoxy
  misc_feature (8)..(11): 2'-deoxy-2'Fluoro
  misc_feature (12)..(13): 2'-deoxy
  misc_feature (14)..(17): 2'-deoxy-2'Fluoro
  misc_feature (18)..(18): 2'-deoxy
  misc_feature (19)..(19): 2'-deoxy-2'Fluoro
  misc_feature (1)..(19): ribonucleotide unmodified or modified as described for this sequence
guaccaguuccgguuucgctt

SEQ ID NO: 2042 - DNA, 21 bp, Artificial Sequence
  Description of Artificial Sequence: Target Sequence/siNA antisense region (stab29)
  misc_feature (20)..(20): Phosphorothioate or Phosphorodithioate 3'-Internucleotide Linkage (optionally present)
  misc_feature (3)..(5): 2'-deoxy-2'Fluoro
  misc_feature (6)..(7): 2'-O-methyl
  misc_feature (8)..(11): 2'-deoxy-2'Fluoro
  misc_feature (12)..(13): 2'-O-methyl
  misc_feature (14)..(17): 2'-deoxy-2'Fluoro
  misc_feature (18)..(19): 2'-O-methyl
  misc_feature (1)..(19): ribonucleotide unmodified or modified as described for this sequence
ggucuagcucuggucccggtt

SEQ ID NO: 2043 - DNA, 21 bp, Artificial Sequence
  Description of Artificial Sequence: Target Sequence/siNA sense region (stab29)
  misc_feature (20)..(20): Phosphorothioate or Phosphorodithioate 3'-Internucleotide Linkage (optionally present)
  misc_feature (2)..(2): 2'-deoxy-2'Fluoro
  misc_feature (4)..(5): 2'-deoxy-2'Fluoro
  misc_feature (6)..(7): 2'-O-methyl
  misc_feature (8)..(11): 2'-deoxy-2'Fluoro
  misc_feature (12)..(13): 2'-O-methyl
  misc_feature (14)..(17): 2'-deoxy-2'Fluoro
  misc_feature (18)..(18): 2'-O-methyl
  misc_feature (19)..(19): 2'-deoxy-2'Fluoro
  misc_feature (1)..(19): ribonucleotide unmodified or modified as described for this sequence
guaccaguuccgguuucgctt

SEQ ID NO: 2044 - DNA, 21 bp, Artificial Sequence
  Description of Artificial Sequence: Target Sequence/siNA antisense region (stab08)
  misc_feature (20)..(20): Phosphorothioate or Phosphorodithioate 3'-Internucleotide Linkage (optionally present)
  misc_feature (1)..(3): 2'-deoxy-2'Fluoro
  misc_feature (4)..(4): 2'-O-methyl
  misc_feature (5)..(5): 2'-deoxy-2'Fluoro
  misc_feature (6)..(6): 2'-O-methyl
  misc_feature (7)..(8): 2'-deoxy-2'Fluoro
  misc_feature (9)..(9): 2'-O-methyl
  misc_feature (10)..(10): 2'-deoxy-2'Fluoro
  misc_feature (11)..(13): 2'-O-methyl
  misc_feature (14)..(14): 2'-deoxy-2'Fluoro
  misc_feature (15)..(15): 2'-O-methyl
  misc_feature (16)..(17): 2'-deoxy-2'Fluoro
  misc_feature (18)..(19): 2'-O-methyl
  misc_feature (1)..(19): ribonucleotide unmodified or modified as described for this sequence
cucgcaucguggguaucagtt

SEQ ID NO: 2045 - DNA, 21 bp, Artificial Sequence
  Description of Artificial Sequence: Target Sequence/siNA antisense region (stab25)
  misc_feature (20)..(20): Phosphorothioate or Phosphorodithioate 3'-Internucleotide Linkage (optionally present)
  misc_feature (4)..(4): 2'-deoxy-2'Fluoro
  misc_feature (5)..(5): 2'-O-methyl
  misc_feature (6)..(9): 2'-deoxy-2'Fluoro
  misc_feature (10)..(10): 2'-O-methyl
  misc_feature (11)..(11): 2'-deoxy-2'Fluoro
  misc_feature (12)..(14): 2'-O-methyl
  misc_feature (15)..(15): 2'-deoxy-2'Fluoro
  misc_feature (16)..(16): 2'-O-methyl
  misc_feature (17)..(19): 2'-deoxy-2'Fluoro
  misc_feature (1)..(19): ribonucleotide unmodified or modified as described for this sequence
gacuaucccacgaacgcuctt

SEQ ID NO: 2046 - DNA, 21 bp, Artificial Sequence
  Description of Artificial Sequence: Target Sequence/siNA antisense region (stab25A)
  misc_feature (20)..(20): Phosphorothioate or Phosphorodithioate 3'-Internucleotide Linkage (optionally present)
  misc_feature (3)..(4): 2'-deoxy-2'Fluoro
  misc_feature (5)..(5): 2'-O-methyl
  misc_feature (6)..(9): 2'-deoxy-2'Fluoro
  misc_feature (10)..(10): 2'-O-methyl
  misc_feature (11)..(11): 2'-deoxy-2'Fluoro
  misc_feature (12)..(14): 2'-O-methyl
  misc_feature (15)..(15): 2'-deoxy-2'Fluoro
  misc_feature (16)..(16): 2'-O-methyl
  misc_feature (1)..(19): ribonucleotide unmodified or modified as described for this sequence
gacuaucccacgaacgcuctt

SEQ ID NO: 2047 - DNA, 21 bp, Artificial Sequence
  Description of Artificial Sequence: Target Sequence/siNA sense region (stab07)
  misc_feature (1)..(1): 5'-3 attached terminal deoxyabasic moiety, inverted abasic, inverted nucleotide or other terminal cap that is optionally present
  misc_feature (1)..(2): 2'-deoxy-2'Fluoro
  misc_feature (3)..(4): 2'-deoxy
  misc_feature (5)..(5): 2'-deoxy-2'Fluoro
  misc_feature (6)..(9): 2'-deoxy
  misc_feature (10)..(10): 2'-deoxy-2'Fluoro
  misc_feature (11)..(11): 2'-deoxy
  misc_feature (12)..(14): 2'-deoxy-2'Fluoro
  misc_feature (15)..(15): 2'-deoxy
  misc_feature (16)..(16): 2'-deoxy-2'Fluoro
  misc_feature (17)..(19): 2'-deoxy
  misc_feature (1)..(19): ribonucleotide unmodified or modified as described for this sequence
cugauagggugcuugcgagtt

SEQ ID NO: 2048 - DNA, 20 bp, Artificial Sequence
  Description of Artificial Sequence: Target Sequence/siNA sense region (stab07)
  misc_feature (1)..(1): 5'-3 attached terminal deoxyabasic moiety, inverted abasic, inverted nucleotide or other terminal cap that is optionally present
  misc_feature (1)..(2): 2'-deoxy-2'Fluoro
  misc_feature (3)..(4): 2'-deoxy
  misc_feature (5)..(5): 2'-deoxy-2'Fluoro
  misc_feature (6)..(9): 2'-deoxy
  misc_feature (10)..(10): 2'-deoxy-2'Fluoro
  misc_feature (11)..(11): 2'-deoxy
  misc_feature (12)..(14): 2'-deoxy-2'Fluoro
  misc_feature (15)..(15): 2'-deoxy
  misc_feature (16)..(16): 2'-deoxy-2'Fluoro
  misc_feature (17)..(19): 2'-deoxy
  misc_feature (1)..(19): ribonucleotide unmodified or modified as described for this sequence
cugauagggugcuugcgagt

SEQ ID NO: 2049 - DNA, 21 bp, Artificial Sequence
  Description of Artificial Sequence: Target Sequence/siNA sense region (stab07)
  misc_feature (21)..(21): 3'-3 attached terminal deoxyabasic moiety, inverted abasic, inverted nucleotide or other terminal cap that is optionally present
  misc_feature (1)..(2): 2'-deoxy-2'Fluoro
  misc_feature (3)..(4): 2'-deoxy
  misc_feature (5)..(5): 2'-deoxy-2'Fluoro
  misc_feature (6)..(9): 2'-deoxy
  misc_feature (10)..(10): 2'-deoxy-2'Fluoro
  misc_feature (11)..(11): 2'-deoxy
  misc_feature (12)..(14): 2'-deoxy-2'Fluoro
  misc_feature (15)..(15): 2'-deoxy
  misc_feature (16)..(16): 2'-deoxy-2'Fluoro
  misc_feature (17)..(19): 2'-deoxy
  misc_feature (1)..(19): ribonucleotide unmodified or modified as described for this sequence
cugauagggugcuugcgagtt

SEQ ID NO: 2050 - DNA, 20 bp, Artificial Sequence
  Description of Artificial Sequence: Target Sequence/siNA sense region (stab07)
  misc_feature (20)..(20): 3'-3 attached terminal deoxyabasic moiety, inverted abasic, inverted nucleotide or other terminal cap that is optionally present
  misc_feature (1)..(1): 2'-deoxy-2'Fluoro
  misc_feature (2)..(3): 2'-deoxy
  misc_feature (4)..(4): 2'-deoxy-2'Fluoro
  misc_feature (5)..(8): 2'-deoxy
  misc_feature (9)..(9): 2'-deoxy-2'Fluoro
  misc_feature (10)..(10): 2'-deoxy
  misc_feature (11)..(13): 2'-deoxy-2'Fluoro
  misc_feature (14)..(14): 2'-deoxy
  misc_feature (15)..(15): 2'-deoxy-2'Fluoro
  misc_feature (16)..(18): 2'-deoxy
  misc_feature (1)..(18): ribonucleotide unmodified or modified as described for this sequence
ugauagggugcuugcgagtt

SEQ ID NO: 2051 - DNA, 19 bp, Artificial Sequence
  Description of Artificial Sequence: Target Sequence/siNA sense region (stab07)
  misc_feature (19)..(19): 3'-3 attached terminal deoxyabasic moiety, inverted abasic, inverted nucleotide or other terminal cap that is optionally present
  misc_feature (3)..(3): 2'-deoxy-2'Fluoro
  misc_feature (4)..(7): 2'-deoxy
  misc_feature (8)..(8): 2'-deoxy-2'Fluoro
  misc_feature (9)..(9): 2'-deoxy
  misc_feature (10)..(12): 2'-deoxy-2'Fluoro
  misc_feature (13)..(13): 2'-deoxy
  misc_feature (14)..(14): 2'-deoxy-2'Fluoro
  misc_feature (15)..(17): 2'-deoxy
  misc_feature (1)..(17): ribonucleotide unmodified or modified as described for this sequence
gauagggugcuugcgagtt

SEQ ID NO: 2052 - DNA, 20 bp, Artificial Sequence
  Description of Artificial Sequence: Target Sequence/siNA antisense region (stab08)
  misc_feature (1)..(3): 2'-deoxy-2'Fluoro
  misc_feature (4)..(4): 2'-O-methyl
  misc_feature (5)..(5): 2'-deoxy-2'Fluoro
  misc_feature (6)..(8): 2'-O-methyl
  misc_feature (9)..(9): 2'-deoxy-2'Fluoro
  misc_feature (10)..(10): 2'-O-methyl
  misc_feature (11)..(14): 2'-deoxy-2'Fluoro
  misc_feature (15)..(15): 2'-O-methyl
  misc_feature (16)..(17): 2'-deoxy-2'Fluoro
  misc_feature (18)..(19): 2'-O-methyl
  misc_feature (1)..(19): ribonucleotide unmodified or modified as described for this sequence
cucgcaagcacccuaucagt

SEQ ID NO: 2053 - DNA, 19 bp, Artificial Sequence
  Description of Artificial Sequence: Target Sequence/siNA antisense region (stab08)
  misc_feature (1)..(3): 2'-deoxy-2'Fluoro
  misc_feature (4)..(4): 2'-O-methyl
  misc_feature (5)..(5): 2'-deoxy-2'Fluoro
  misc_feature (6)..(8): 2'-O-methyl
  misc_feature (9)..(9): 2'-deoxy-2'Fluoro
  misc_feature (10)..(10): 2'-O-methyl
  misc_feature (11)..(14): 2'-deoxy-2'Fluoro
  misc_feature (15)..(15): 2'-O-methyl
  misc_feature (16)..(17): 2'-deoxy-2'Fluoro
  misc_feature (18)..(19): 2'-O-methyl
  misc_feature (1)..(19): ribonucleotide unmodified or modified as described for this sequence
cucgcaagcacccuaucag

SEQ ID NO: 2054 - DNA, 18 bp, Artificial Sequence
  Description of Artificial Sequence: Target Sequence/siNA antisense region (stab08)
  misc_feature (1)..(3): 2'-deoxy-2'Fluoro
  misc_feature (4)..(4): 2'-O-methyl
  misc_feature (5)..(5): 2'-deoxy-2'Fluoro
  misc_feature (6)..(8): 2'-O-methyl
  misc_feature (9)..(9): 2'-deoxy-2'Fluoro
  misc_feature (10)..(10): 2'-O-methyl
  misc_feature (11)..(14): 2'-deoxy-2'Fluoro
  misc_feature (15)..(15): 2'-O-methyl
  misc_feature (16)..(17): 2'-deoxy-2'Fluoro
  misc_feature (18)..(18): 2'-O-methyl
  misc_feature (1)..(18): ribonucleotide unmodified or modified as described for this sequence
cucgcaagcacccuauca

SEQ ID NO: 2055 - DNA, 20 bp, Artificial Sequence
  Description of Artificial Sequence: Target Sequence/siNA antisense region (stab08)
  misc_feature (19)..(19): Phosphorothioate or Phosphorodithioate 3'-Internucleotide Linkage (optionally present)
  misc_feature (1)..(2): 2'-deoxy-2'Fluoro
  misc_feature (3)..(3): 2'-O-methyl
  misc_feature (4)..(4): 2'-deoxy-2'Fluoro
  misc_feature (5)..(7): 2'-O-methyl
  misc_feature (8)..(8): 2'-deoxy-2'Fluoro
  misc_feature (9)..(9): 2'-O-methyl
  misc_feature (10)..(13): 2'-deoxy-2'Fluoro
  misc_feature (14)..(14): 2'-O-methyl
  misc_feature (15)..(16): 2'-deoxy-2'Fluoro
  misc_feature (17)..(18): 2'-O-methyl
  misc_feature (1)..(18): ribonucleotide unmodified or modified as described for this sequence
ucgcaagcacccuaucagtt

SEQ ID NO: 2056 - DNA, 19 bp, Artificial Sequence
  Description of Artificial Sequence: Target Sequence/siNA antisense region (stab08)
  misc_feature (18)..(18): Phosphorothioate or Phosphorodithioate 3'-Internucleotide Linkage (optionally present)
  misc_feature (1)..(1): 2'-deoxy-2'Fluoro
  misc_feature (2)..(2): 2'-O-methyl
  misc_feature (3)..(3): 2'-deoxy-2'Fluoro
  misc_feature (4)..(6): 2'-O-methyl
  misc_feature (7)..(7): 2'-deoxy-2'Fluoro
  misc_feature (8)..(8): 2'-O-methyl
  misc_feature (9)..(12): 2'-deoxy-2'Fluoro
  misc_feature (13)..(13): 2'-O-methyl
  misc_feature (14)..(15): 2'-deoxy-2'Fluoro
  misc_feature (16)..(17): 2'-O-methyl
  misc_feature (1)..(17): ribonucleotide unmodified or modified as described for this sequence
cgcaagcacccuaucagtt

SEQ ID NO: 2057 - DNA, 18 bp, Artificial Sequence
  Description of Artificial Sequence: Target Sequence/siNA antisense region (stab08)
  misc_feature (17)..(17): Phosphorothioate or Phosphorodithioate 3'-Internucleotide Linkage (optionally present)
  misc_feature (2)..(2): 2'-deoxy-2'Fluoro
  misc_feature (3)..(5): 2'-O-methyl
  misc_feature (6)..(6): 2'-deoxy-2'Fluoro
  misc_feature (7)..(7): 2'-O-methyl
  misc_feature (8)..(11): 2'-deoxy-2'Fluoro
  misc_feature (12)..(12): 2'-O-methyl
  misc_feature (13)..(14): 2'-deoxy-2'Fluoro
  misc_feature (15)..(16): 2'-O-methyl
  misc_feature (1)..(16): ribonucleotide unmodified or modified as described for this sequence
gcaagcacccuaucagtt

SEQ ID NO: 2058 - DNA, 20 bp, Artificial Sequence
  Description of Artificial Sequence: Target Sequence/siNA antisense region (stab25)
  misc_feature (4)..(4): 2'-O-methyl
  misc_feature (5)..(5): 2'-deoxy-2'Fluoro
  misc_feature (6)..(8): 2'-O-methyl
  misc_feature (9)..(9): 2'-deoxy-2'Fluoro
  misc_feature (10)..(10): 2'-O-methyl
  misc_feature (11)..(14): 2'-deoxy-2'Fluoro
  misc_feature (15)..(15): 2'-O-methyl
  misc_feature (16)..(17): 2'-deoxy-2'Fluoro
  misc_feature (18)..(19): 2'-O-methyl
  misc_feature (1)..(19): ribonucleotide unmodified or modified as described for this sequence
cucgcaagcacccuaucagt

SEQ ID NO: 2059 - DNA, 18 bp, Artificial Sequence
  Description of Artificial Sequence: Target Sequence/siNA antisense region (stab25)
  misc_feature (4)..(4): 2'-O-methyl
  misc_feature (5)..(5): 2'-deoxy-2'Fluoro
  misc_feature (6)..(8): 2'-O-methyl
  misc_feature (9)..(9): 2'-deoxy-2'Fluoro
  misc_feature (10)..(10): 2'-O-methyl
  misc_feature (11)..(14): 2'-deoxy-2'Fluoro
  misc_feature (15)..(15): 2'-O-methyl
  misc_feature (16)..(17): 2'-deoxy-2'Fluoro
  misc_feature (18)..(18): 2'-O-methyl
  misc_feature (1)..(18): ribonucleotide unmodified or modified as described for this sequence
cucgcaagcacccuauca

SEQ ID NO: 2060 - DNA, 20 bp, Artificial Sequence
  Description of Artificial Sequence: Target Sequence/siNA antisense region (stab25)
  misc_feature (19)..(19): Phosphorothioate or Phosphorodithioate 3'-Internucleotide Linkage (optionally present)
  misc_feature (3)..(3): 2'-O-methyl
  misc_feature (4)..(4): 2'-deoxy-2'Fluoro
  misc_feature (5)..(7): 2'-O-methyl
  misc_feature (8)..(8): 2'-deoxy-2'Fluoro
  misc_feature (9)..(9): 2'-O-methyl
  misc_feature (10)..(13): 2'-deoxy-2'Fluoro
  misc_feature (14)..(14): 2'-O-methyl
  misc_feature (15)..(16): 2'-deoxy-2'Fluoro
  misc_feature (17)..(18): 2'-O-methyl
  misc_feature (1)..(18): ribonucleotide unmodified or modified as described for this sequence
ucgcaagcacccuaucagtt

SEQ ID NO: 2061 - DNA, 19 bp, Artificial Sequence
  Description of Artificial Sequence: Target Sequence/siNA antisense region (stab25)
  misc_feature (18)..(18): Phosphorothioate or Phosphorodithioate 3'-Internucleotide Linkage (optionally present)
  misc_feature (2)..(2): 2'-O-methyl
  misc_feature (3)..(3): 2'-deoxy-2'Fluoro
  misc_feature (4)..(6): 2'-O-methyl
  misc_feature (7)..(7): 2'-deoxy-2'Fluoro
  misc_feature (8)..(8): 2'-O-methyl
  misc_feature (9)..(12): 2'-deoxy-2'Fluoro
  misc_feature (13)..(13): 2'-O-methyl
  misc_feature (14)..(15): 2'-deoxy-2'Fluoro
  misc_feature (16)..(17): 2'-O-methyl
  misc_feature (1)..(17): ribonucleotide unmodified or modified as described for this sequence
cgcaagcacccuaucagtt

SEQ ID NO: 2062 - DNA, 21 bp, Artificial Sequence
  Description of Artificial Sequence: Target Sequence/siNA sense region (stab07)
  misc_feature (1)..(1): 5'-3 attached terminal deoxyabasic moiety, inverted abasic, inverted nucleotide or other terminal cap that is optionally present
  misc_feature (21)..(21): 3'-3 attached terminal deoxyabasic moiety, inverted abasic, inverted nucleotide or other terminal cap that is optionally present
  misc_feature (1)..(4): 2'-deoxy-2'Fluoro
  misc_feature (5)..(5): 2'-deoxy
  misc_feature (6)..(6): 2'-deoxy-2'Fluoro
  misc_feature (7)..(7): 2'-deoxy
  misc_feature (8)..(8): 2'-deoxy-2'Fluoro
  misc_feature (9)..(14): 2'-deoxy
  misc_feature (15)..(15): 2'-deoxy-2'Fluoro
  misc_feature (16)..(16): 2'-deoxy
  misc_feature (17)..(19): 2'-deoxy-2'Fluoro
  misc_feature (1)..(19): ribonucleotide unmodified or modified as described for this sequence
cuucacgcagaaagcgucutt

SEQ ID NO: 2063 - DNA, 21 bp, Artificial Sequence
  Description of Artificial Sequence: Target Sequence/siNA sense region (stab07)
  misc_feature (1)..(1): 5'-3 attached terminal deoxyabasic moiety, inverted abasic, inverted nucleotide or other terminal cap that is optionally present
  misc_feature (21)..(21): 3'-3 attached terminal deoxyabasic moiety, inverted abasic, inverted nucleotide or other terminal cap that is optionally present
  misc_feature (1)..(1): 2'-deoxy
  misc_feature (2)..(2): 2'-deoxy-2'Fluoro
  misc_feature (3)..(3): 2'-deoxy
  misc_feature (4)..(6): 2'-deoxy-2'Fluoro
  misc_feature (7)..(8): 2'-deoxy
  misc_feature (9)..(10): 2'-deoxy-2'Fluoro
  misc_feature (11)..(11): 2'-deoxy
  misc_feature (12)..(12): 2'-deoxy-2'Fluoro
  misc_feature (13)..(14): 2'-deoxy
  misc_feature (15)..(15): 2'-deoxy-2'Fluoro
  misc_feature (16)..(16): 2'-deoxy
  misc_feature (17)..(18): 2'-deoxy-2'Fluoro
  misc_feature (19)..(19): 2'-deoxy
  misc_feature (1)..(19): ribonucleotide unmodified or modified as described for this sequence
gcgucuagccauggcguuatt

SEQ ID NO: 2064 - DNA, 21 bp, Artificial Sequence
  Description of Artificial Sequence: Target Sequence/siNA sense region (stab07)
  misc_feature (1)..(1): 5'-3 attached terminal deoxyabasic moiety, inverted abasic, inverted nucleotide or other terminal cap that is optionally present
  misc_feature (21)..(21): 3'-3 attached terminal deoxyabasic moiety, inverted abasic, inverted nucleotide or other terminal cap that is optionally present
  misc_feature (1)..(3): 2'-deoxy
  misc_feature (4)..(4): 2'-deoxy-2'Fluoro
  misc_feature (5)..(5): 2'-deoxy
  misc_feature (6)..(6): 2'-deoxy-2'Fluoro
  misc_feature (7)..(7): 2'-deoxy
  misc_feature (8)..(9): 2'-deoxy-2'Fluoro
  misc_feature (10)..(13): 2'-deoxy
  misc_feature (14)..(15): 2'-deoxy-2'Fluoro
  misc_feature (16)..(16): 2'-deoxy
  misc_feature (17)..(18): 2'-deoxy-2'Fluoro
  misc_feature (19)..(19): 2'-deoxy
  misc_feature (1)..(19): ribonucleotide unmodified or modified as described for this sequence
gaguacaccggaauugccatt

SEQ ID NO: 2065 - DNA, 21 bp, Artificial Sequence
  Description of Artificial Sequence: Target Sequence/siNA sense region (stab07)
  misc_feature (1)..(1): 5'-3 attached terminal deoxyabasic moiety, inverted abasic, inverted nucleotide or other terminal cap that is optionally present
  misc_feature (21)..(21): 3'-3 attached terminal deoxyabasic moiety, inverted abasic, inverted nucleotide or other terminal cap that is optionally present
  misc_feature (1)..(2): 2'-deoxy
  misc_feature (3)..(4): 2'-deoxy-2'Fluoro
  misc_feature (5)..(7): 2'-deoxy
  misc_feature (8)..(16): 2'-deoxy-2'Fluoro
  misc_feature (17)..(19): 2'-deoxy
  misc_feature (1)..(19): ribonucleotide unmodified or modified as described for this sequence
gaccggguccuuucuuggatt

SEQ ID NO: 2066 - DNA, 21 bp, Artificial Sequence
  Description of Artificial Sequence: Target Sequence/siNA sense region (stab07)
  misc_feature (1)..(1): 5'-3 attached terminal deoxyabasic moiety, inverted abasic, inverted nucleotide or other terminal cap that is optionally present
  misc_feature (21)..(21): 3'-3 attached terminal deoxyabasic moiety, inverted abasic, inverted nucleotide or other terminal cap that is optionally present
  misc_feature (1)..(1): 2'-deoxy-2'Fluoro
  misc_feature (2)..(2): 2'-deoxy
  misc_feature (3)..(5): 2'-deoxy-2'Fluoro
  misc_feature (6)..(7): 2'-deoxy
  misc_feature (8)..(8): 2'-deoxy-2'Fluoro
  misc_feature (9)..(9): 2'-deoxy
  misc_feature (10)..(12): 2'-deoxy-2'Fluoro
  misc_feature (13)..(17): 2'-deoxy
  misc_feature (18)..(19): 2'-deoxy-2'Fluoro
  misc_feature (1)..(19): ribonucleotide unmodified or modified as described for this sequence
cgcucaaugccuggagauutt

SEQ ID NO: 2067 - DNA, 21 bp, Artificial Sequence
  Description of Artificial Sequence: Target Sequence/siNA sense region (stab07)
  misc_feature (1)..(1): 5'-3 attached terminal deoxyabasic moiety, inverted abasic, inverted nucleotide or other terminal cap that is optionally present
  misc_feature (21)..(21): 3'-3 attached terminal deoxyabasic moiety, inverted abasic, inverted nucleotide or other terminal cap that is optionally present
  misc_feature (1)..(2): 2'-deoxy-2'Fluoro
  misc_feature (3)..(3): 2'-deoxy
  misc_feature (4)..(4): 2'-deoxy-2'Fluoro
  misc_feature (5)..(8): 2'-deoxy
  misc_feature (9)..(10): 2'-deoxy-2'Fluoro
  misc_feature (11)..(11): 2'-deoxy
  misc_feature (12)..(13): 2'-deoxy-2'Fluoro
  misc_feature (14)..(15): 2'-deoxy
  misc_feature (16)..(17): 2'-deoxy-2'Fluoro
  misc_feature (18)..(19): 2'-deoxy
  misc_feature (1)..(19): ribonucleotide unmodified or modified as described for this sequence
ccgcgagacugcuagccgatt

SEQ ID NO: 2068 - DNA, 21 bp, Artificial Sequence
  Description of Artificial Sequence: Target Sequence/siNA sense region (stab07)
  misc_feature (1)..(1): 5'-3 attached terminal deoxyabasic moiety, inverted abasic, inverted nucleotide or other terminal cap that is optionally present
  misc_feature (21)..(21): 3'-3 attached terminal deoxyabasic moiety, inverted abasic, inverted nucleotide or other terminal cap that is optionally present
  misc_feature (1)..(1): 2'-deoxy
  misc_feature (2)..(2): 2'-deoxy-2'Fluoro
  misc_feature (3)..(6): 2'-deoxy
  misc_feature (7)..(8): 2'-deoxy-2'Fluoro
  misc_feature (9)..(9): 2'-deoxy
  misc_feature (10)..(11): 2'-deoxy-2'Fluoro
  misc_feature (12)..(13): 2'-deoxy
  misc_feature (14)..(15): 2'-deoxy-2'Fluoro
  misc_feature (16)..(18): 2'-deoxy
  misc_feature (19)..(19): 2'-deoxy-2'Fluoro
  misc_feature (1)..(19): ribonucleotide unmodified or modified as described for this sequence
gcgagacugcuagccgagutt

SEQ ID NO: 2069 - DNA, 21 bp, Artificial Sequence
  Description of Artificial Sequence: Target Sequence/siNA sense region (stab07)
  misc_feature (1)..(1): 5'-3 attached terminal deoxyabasic moiety, inverted abasic, inverted nucleotide or other terminal cap that is optionally present
  misc_feature (21)..(21): 3'-3 attached terminal deoxyabasic moiety, inverted abasic, inverted nucleotide or other terminal cap that is optionally present
  misc_feature (1)..(3): 2'-deoxy
  misc_feature (4)..(4): 2'-deoxy-2'Fluoro
  misc_feature (5)..(6): 2'-deoxy
  misc_feature (7)..(7): 2'-deoxy-2'Fluoro
  misc_feature (8)..(8): 2'-deoxy
  misc_feature (9)..(10): 2'-deoxy-2'Fluoro
  misc_feature (11)..(13): 2'-deoxy
  misc_feature (14)..(15): 2'-deoxy-2'Fluoro
  misc_feature (16)..(16): 2'-deoxy
  misc_feature (17)..(17): 2'-deoxy-2'Fluoro
  misc_feature (18)..(19): 2'-deoxy
  misc_feature (1)..(19): ribonucleotide unmodified or modified as described for this sequence
gaguaguguugggucgcgatt

SEQ ID NO: 2070 - DNA, 21 bp, Artificial Sequence
  Description of Artificial Sequence: Target Sequence/siNA sense region (stab07)
  misc_feature (1)..(1): 5'-3 attached terminal deoxyabasic moiety, inverted abasic, inverted nucleotide or other terminal cap that is optionally present
  misc_feature (21)..(21): 3'-3 attached terminal deoxyabasic moiety, inverted abasic, inverted nucleotide or other terminal cap that is optionally present
  misc_feature (1)..(1): 2'-deoxy
  misc_feature (2)..(3): 2'-deoxy-2'Fluoro
  misc_feature (4)..(6): 2'-deoxy
  misc_feature (7)..(8): 2'-deoxy-2'Fluoro
  misc_feature (9)..(9): 2'-deoxy
  misc_feature (10)..(10): 2'-deoxy-2'Fluoro
  misc_feature (11)..(16): 2'-deoxy
  misc_feature (17)..(19): 2'-deoxy-2'Fluoro
  misc_feature (1)..(19): ribonucleotide unmodified or modified as described for this sequence
guugggucgcgaaaggccutt

SEQ ID NO: 2071 - DNA, 21 bp, Artificial Sequence
  Description of Artificial Sequence: Target Sequence/siNA sense region (stab07)
  misc_feature (1)..(1): 5'-3 attached terminal deoxyabasic moiety, inverted abasic, inverted nucleotide or other terminal cap that is optionally present
  misc_feature (21)..(21): 3'-3 attached terminal deoxyabasic moiety, inverted abasic, inverted nucleotide or other terminal cap that is optionally present
  misc_feature (1)..(3): 2'-deoxy
  misc_feature (4)..(5): 2'-deoxy-2'Fluoro
  misc_feature (6)..(6): 2'-deoxy
  misc_feature (7)..(7): 2'-deoxy-2'Fluoro
  misc_feature (8)..(13): 2'-deoxy
  misc_feature (14)..(17): 2'-deoxy-2'Fluoro
  misc_feature (18)..(18): 2'-deoxy
  misc_feature (19)..(19): 2'-deoxy-2'Fluoro
  misc_feature (1)..(19): ribonucleotide unmodified or modified as described for this sequence
gggucgcgaaaggccuugutt

SEQ ID NO: 2072 - DNA, 21 bp, Artificial Sequence
  Description of Artificial Sequence: Target Sequence/siNA antisense region (stab25)
  misc_feature (20)..(20): Phosphorothioate or Phosphorodithioate 3'-Internucleotide Linkage (optionally present)
  misc_feature (4)..(4): 2'-deoxy-2'Fluoro
  misc_feature (5)..(5): 2'-O-methyl
  misc_feature (6)..(11): 2'-deoxy-2'Fluoro
  misc_feature (12)..(12): 2'-O-methyl
  misc_feature (13)..(13): 2'-deoxy-2'Fluoro
  misc_feature (14)..(14): 2'-O-methyl
  misc_feature (15)..(15): 2'-deoxy-2'Fluoro
  misc_feature (16)..(19): 2'-O-methyl
  misc_feature (1)..(19): ribonucleotide unmodified or modified as described for this sequence
agacgcuuucugcgugaagtt

SEQ ID NO: 2073 - DNA, 21 bp, Artificial Sequence
  Description of Artificial Sequence: Target Sequence/siNA antisense region (stab25)
  misc_feature (20)..(20): Phosphorothioate or Phosphorodithioate 3'-Internucleotide Linkage (optionally present)
  misc_feature (4)..(4): 2'-deoxy-2'Fluoro
  misc_feature (5)..(5): 2'-O-methyl
  misc_feature (6)..(7): 2'-deoxy-2'Fluoro
  misc_feature (8)..(8): 2'-O-methyl
  misc_feature (9)..(9): 2'-deoxy-2'Fluoro
  misc_feature (10)..(11): 2'-O-methyl
  misc_feature (12)..(13): 2'-deoxy-2'Fluoro
  misc_feature (14)..(16): 2'-O-methyl
  misc_feature (17)..(17): 2'-deoxy-2'Fluoro
  misc_feature (18)..(18): 2'-O-methyl
  misc_feature (19)..(19): 2'-deoxy-2'Fluoro
  misc_feature (1)..(19): ribonucleotide unmodified or modified as described for this sequence
uaacgccauggcuagacgctt

SEQ ID NO: 2074 - DNA, 21 bp, Artificial Sequence
  Description of Artificial Sequence: Target Sequence/siNA antisense region (stab25)
  misc_feature (20)..(20): Phosphorothioate or Phosphorodithioate 3'-Internucleotide Linkage (optionally present)
  misc_feature (4)..(4): 2'-O-methyl
  misc_feature (5)..(6): 2'-deoxy-2'Fluoro
  misc_feature (7)..(7): 2'-O-methyl
  misc_feature (8)..(8): 2'-deoxy-2'Fluoro
  misc_feature (9)..(10): 2'-O-methyl
  misc_feature (11)..(17): 2'-deoxy-2'Fluoro
  misc_feature (18)..(19): 2'-O-methyl
  misc_feature (1)..(19): ribonucleotide unmodified or modified as described for this sequence
accacuauggcucucccggtt

SEQ ID NO: 2075 - DNA, 21 bp, Artificial Sequence
  Description of Artificial Sequence: Target Sequence/siNA antisense region (stab25)
  misc_feature (20)..(20): Phosphorothioate or Phosphorodithioate 3'-Internucleotide Linkage (optionally present)
  misc_feature (4)..(4): 2'-deoxy-2'Fluoro
  misc_feature (5)..(5): 2'-O-methyl
  misc_feature (6)..(7): 2'-deoxy-2'Fluoro
  misc_feature (8)..(9): 2'-O-methyl
  misc_feature (10)..(13): 2'-deoxy-2'Fluoro
  misc_feature (14)..(14): 2'-O-methyl
  misc_feature (15)..(15): 2'-deoxy-2'Fluoro
  misc_feature (16)..(18): 2'-O-methyl
  misc_feature (19)..(19): 2'-deoxy-2'Fluoro
  misc_feature (1)..(19): ribonucleotide unmodified or modified as described for this sequence
acucaccgguuccgcagactt

SEQ ID NO: 2076 - DNA, 21 bp, Artificial Sequence
  Description of Artificial Sequence: Target Sequence/siNA antisense region (stab25)
  misc_feature (20)..(20): Phosphorothioate or Phosphorodithioate 3'-Internucleotide Linkage (optionally present)
  misc_feature (4)..(4): 2'-deoxy-2'Fluoro
  misc_feature (5)..(6): 2'-O-methyl
  misc_feature (7)..(10): 2'-deoxy-2'Fluoro
  misc_feature (11)..(12): 2'-O-methyl
  misc_feature (13)..(13): 2'-deoxy-2'Fluoro
  misc_feature (14)..(14): 2'-O-methyl
  misc_feature (15)..(15): 2'-deoxy-2'Fluoro
  misc_feature (16)..(16): 2'-O-methyl
  misc_feature (17)..(19): 2'-deoxy-2'Fluoro
  misc_feature (1)..(19): ribonucleotide unmodified or modified as described for this sequence
uggcaauuccgguguacuctt

SEQ ID NO: 2077 - DNA, 21 bp, Artificial Sequence
  Description of Artificial Sequence: Target Sequence/siNA antisense region (stab25)
  misc_feature (20)..(20): Phosphorothioate or Phosphorodithioate 3'-Internucleotide Linkage (optionally present)
  misc_feature (4)..(12): 2'-O-methyl
  misc_feature (13)..(15): 2'-deoxy-2'Fluoro
  misc_feature (16)..(17): 2'-O-methyl
  misc_feature (18)..(19): 2'-deoxy-2'Fluoro
  misc_feature (1)..(19): ribonucleotide unmodified or modified as described for this sequence
uccaagaaaggacccgguctt

SEQ ID NO: 2078 - DNA, 21 bp, Artificial Sequence
  Description of Artificial Sequence: Target Sequence/siNA antisense region (stab25)
  misc_feature (20)..(20): Phosphorothioate or Phosphorodithioate 3'-Internucleotide Linkage (optionally present)
  misc_feature (4)..(7): 2'-deoxy-2'Fluoro
  misc_feature (8)..(10): 2'-O-methyl
  misc_feature (11)..(11): 2'-deoxy-2'Fluoro
  misc_feature (12)..(12): 2'-O-methyl
  misc_feature (13)..(14): 2'-deoxy-2'Fluoro
  misc_feature (15)..(17): 2'-O-methyl
  misc_feature (18)..(18): 2'-deoxy-2'Fluoro
  misc_feature (19)..(19): 2'-O-methyl
  misc_feature (1)..(19): ribonucleotide unmodified or modified as described for this sequence
aaucuccaggcauugagcgtt

SEQ ID NO: 2079 - DNA, 21 bp, Artificial Sequence
  Description of Artificial Sequence: Target Sequence/siNA antisense region (stab25)
  misc_feature (20)..(20): Phosphorothioate or Phosphorodithioate 3'-Internucleotide Linkage (optionally present)
  misc_feature (4)..(4): 2'-O-methyl
  misc_feature (5)..(6): 2'-deoxy-2'Fluoro
  misc_feature (7)..(8): 2'-O-methyl
  misc_feature (9)..(9): 2'-deoxy-2'Fluoro
  misc_feature (10)..(11): 2'-O-methyl
  misc_feature (12)..(15): 2'-deoxy-2'Fluoro
  misc_feature (16)..(16): 2'-O-methyl
  misc_feature (17)..(17): 2'-deoxy-2'Fluoro
  misc_feature (18)..(19): 2'-O-methyl
  misc_feature (1)..(19): ribonucleotide unmodified or modified as described for this sequence
ucggcuagcagucucgcggtt

SEQ ID NO: 2080 - DNA, 21 bp, Artificial Sequence
  Description of Artificial Sequence: Target Sequence/siNA antisense region (stab25)
  misc_feature (20)..(20): Phosphorothioate or Phosphorodithioate 3'-Internucleotide Linkage (optionally present)
  misc_feature (4)..(4): 2'-deoxy-2'Fluoro
  misc_feature (5)..(6): 2'-O-methyl
  misc_feature (7)..(8): 2'-deoxy-2'Fluoro
  misc_feature (9)..(10): 2'-O-methyl
  misc_feature (11)..(11): 2'-deoxy-2'Fluoro
  misc_feature (12)..(13): 2'-O-methyl
  misc_feature (14)..(17): 2'-deoxy-2'Fluoro
  misc_feature (18)..(18): 2'-O-methyl
  misc_feature (19)..(19): 2'-deoxy-2'Fluoro
  misc_feature (1)..(19): ribonucleotide unmodified or modified as described for this sequence
acucggcuagcagucucgctt

SEQ ID NO: 2081 - DNA, 21 bp, Artificial Sequence
  Description of Artificial Sequence: Target Sequence/siNA antisense region (stab25)
  misc_feature (20)..(20): Phosphorothioate or Phosphorodithioate 3'-Internucleotide Linkage (optionally present)
  misc_feature (4)..(4): 2'-deoxy-2'Fluoro
  misc_feature (5)..(6): 2'-O-methyl
  misc_feature (7)..(9): 2'-deoxy-2'Fluoro
  misc_feature (10)..(11): 2'-O-methyl
  misc_feature (12)..(12): 2'-deoxy-2'Fluoro
  misc_feature (13)..(13): 2'-O-methyl
  misc_feature (14)..(15): 2'-deoxy-2'Fluoro
  misc_feature (16)..(16): 2'-O-methyl
  misc_feature (17)..(19): 2'-deoxy-2'Fluoro
  misc_feature (1)..(19): ribonucleotide unmodified or modified as described for this sequence
ucgcgacccaacacuacuctt

SEQ ID NO: 2082 - DNA, 21 bp, Artificial Sequence
  Description of Artificial Sequence: Target Sequence/siNA antisense region (stab25)
  misc_feature (20)..(20): Phosphorothioate or Phosphorodithioate 3'-Internucleotide Linkage (optionally present)
  misc_feature (4)..(9): 2'-deoxy-2'Fluoro
  misc_feature (10)..(10): 2'-O-methyl
  misc_feature (11)..(11): 2'-deoxy-2'Fluoro
  misc_feature (12)..(13): 2'-O-methyl
  misc_feature (14)..(16): 2'-deoxy-2'Fluoro
  misc_feature (17)..(18): 2'-O-methyl
  misc_feature (19)..(19): 2'-deoxy-2'Fluoro
  misc_feature (1)..(19): ribonucleotide unmodified or modified as described for this sequence
aggccuuucgcgacccaactt

SEQ ID NO: 2083 - DNA, 21 bp, Artificial Sequence
  Description of Artificial Sequence: Target Sequence/siNA antisense region (stab25)
  misc_feature (20)..(20): Phosphorothioate or Phosphorodithioate 3'-Internucleotide Linkage (optionally present)
  misc_feature (4)..(6): 2'-O-methyl
  misc_feature (7)..(12): 2'-deoxy-2'Fluoro
  misc_feature (13)..(13): 2'-O-methyl
  misc_feature (14)..(14): 2'-deoxy-2'Fluoro
  misc_feature (15)..(16): 2'-O-methyl
  misc_feature (17)..(19): 2'-deoxy-2'Fluoro
  misc_feature (1)..(19): ribonucleotide unmodified or modified as described for this sequence
acaaggccuuucgcgaccctt

SEQ ID NO: 2084 - DNA, 21 bp, Artificial Sequence
  Description of Artificial Sequence: Target Sequence/siNA antisense region (stab25)
  misc_feature (20)..(20): Phosphorothioate or Phosphorodithioate 3'-Internucleotide Linkage (optionally present)
  misc_feature (4)..(4): 2'-deoxy-2'Fluoro
  misc_feature (5)..(7): 2'-O-methyl
  misc_feature (8)..(8): 2'-deoxy-2'Fluoro
  misc_feature (9)..(9): 2'-O-methyl
  misc_feature (10)..(13): 2'-deoxy-2'Fluoro
  misc_feature (14)..(14): 2'-O-methyl
  misc_feature (15)..(16): 2'-deoxy-2'Fluoro
  misc_feature (17)..(19): 2'-O-methyl
  misc_feature (1)..(19): ribonucleotide unmodified or modified as described for this sequence
ucgcaagcacccuaucaggtt

SEQ ID NO: 2085 - DNA, 21 bp, Artificial Sequence
  Description of Artificial Sequence: Target Sequence/siNA antisense region (stab25)
  misc_feature (20)..(20): Phosphorothioate or Phosphorodithioate 3'-Internucleotide Linkage (optionally present)
  misc_feature (4)..(4): 2'-O-methyl
  misc_feature (5)..(7): 2'-deoxy-2'Fluoro
  misc_feature (8)..(8): 2'-O-methyl
  misc_feature (9)..(9): 2'-deoxy-2'Fluoro
  misc_feature (10)..(13): 2'-O-methyl
  misc_feature (14)..(19): 2'-deoxy-2'Fluoro
  misc_feature (1)..(19): ribonucleotide unmodified or modified as described for this sequence
acggucuacgagaccuccctt

SEQ ID NO: 2086 - DNA, 21 bp, Artificial Sequence
  Description of Artificial Sequence: Target Sequence/siNA sense region (stab04)
  misc_feature (1)..(1): 5'-3 attached terminal deoxyabasic moiety, inverted abasic, inverted nucleotide or other terminal cap that is optionally present
  misc_feature (21)..(21): 3'-3 attached terminal deoxyabasic moiety, inverted abasic, inverted nucleotide or other terminal cap that is optionally present
  misc_feature (4)..(4): 2'-deoxy-2'Fluoro
  misc_feature (6)..(8): 2'-deoxy-2'Fluoro
  misc_feature (10)..(10): 2'-deoxy-2'Fluoro
  misc_feature (15)..(15): 2'-deoxy-2'Fluoro
  misc_feature (18)..(19): 2'-deoxy-2'Fluoro
  misc_feature (1)..(19): ribonucleotide unmodified or modified as described for this sequence
gagcguucgugggauaguctt

SEQ ID NO: 2087 - DNA, 21 bp, Artificial Sequence
  Description of Artificial Sequence: Target Sequence/siNA antisense region (stab29A)
  misc_feature (20)..(20): Phosphorothioate or Phosphorodithioate 3'-Internucleotide Linkage (optionally present)
  misc_feature (3)..(8): 2'-deoxy-2'Fluoro
  misc_feature (9)..(12): 2'-O-methyl
  misc_feature (13)..(13): 2'-deoxy-2'Fluoro
  misc_feature (14)..(14): 2'-O-methyl
  misc_feature (15)..(17): 2'-deoxy-2'Fluoro
  misc_feature (1)..(19): ribonucleotide unmodified or modified as described for this sequence
ggcccuccagagcaucuggtt

SEQ ID NO: 2088 - RNA, 25 nt, Artificial Sequence
  Description of Artificial Sequence: Target Sequence/siNA sense region (stab00)
uuuguagccaaauccuuucugguac

SEQ ID NO: 2089 - RNA, 27 nt, Artificial Sequence
  Description of Artificial Sequence: Target Sequence/siNA sense region (stab00)
uuuuuguagccaaauccuuugugguac

SEQ ID NO: 2090 - RNA, 27 nt, Artificial Sequence
  Description of Artificial Sequence: Target Sequence/siNA sense region (stab00)
ccuggaucaugaaguccuuugugguac

SEQ ID NO: 2091 - RNA, 27 nt, Artificial Sequence
  Description of Artificial Sequence: Target Sequence/siNA sense region (stab00)
ugucugucuuggugcucuccuugcgag

SEQ ID NO: 2092 - RNA, 24 nt, Artificial Sequence
  Description of Artificial Sequence: Target Sequence/siNA sense region (stab00)
uguuuuuggaacagucuuugcgag

SEQ ID NO: 2093 - RNA, 26 nt, Artificial Sequence
  Description of Artificial Sequence: Target Sequence/siNA sense region (stab00)
ugucugucuuggugcucucguagacc

SEQ ID NO: 2094 - RNA, 27 nt, Artificial Sequence
  Description of Artificial Sequence: Target Sequence/siNA sense region (stab00)
cuuuccuccugugccaucucguagacc

SEQ ID NO: 2095 - RNA, 25 nt, Artificial Sequence
  Description of Artificial Sequence: Target Sequence/siNA antisense region (stab00)
guaccacaaggccuuucgcuacaaa

SEQ ID NO: 2096 - RNA, 27 nt, Artificial Sequence
  Description of Artificial Sequence: Target Sequence/siNA antisense region (stab00)
guaccacaaggccuuucgcuacaaaaa

SEQ ID NO: 2097 - RNA, 27 nt, Artificial Sequence
  Description of Artificial Sequence: Target Sequence/siNA antisense region (stab00)
guaccacaaggccuuucgcgauccagg

SEQ ID NO: 2098 - RNA, 27 nt, Artificial Sequence
  Description of Artificial Sequence: Target Sequence/siNA antisense region (stab00)
cucgcaagcacccuaucaggacagaca

SEQ ID NO: 2099 - RNA, 24 nt, Artificial Sequence
  Description of Artificial Sequence: Target Sequence/siNA antisense region (stab00)
cucgcaagcacccuaucagaaaca

SEQ ID NO: 2100 - RNA, 26 nt, Artificial Sequence
  Description of Artificial Sequence: Target Sequence/siNA antisense region (stab00)
ggucuacgagaccucccggacagaca

SEQ ID NO: 2101 - RNA, 27 nt, Artificial Sequence
  Description of Artificial Sequence: Target Sequence/siNA antisense region (stab00)
ggucuacgagaccucccgggaggaaag

SEQ ID NO: 2102 - DNA, 21 bp, Artificial Sequence
  Description of Artificial Sequence: Target Sequence/siNA antisense region (stab36)
  misc_feature (4)..(4): 2'-O-methyl
  misc_feature (5)..(5): 2'-deoxy-2'Fluoro
  misc_feature (6)..(8): 2'-O-methyl
  misc_feature (9)..(9): 2'-deoxy-2'Fluoro
  misc_feature (10)..(10): 2'-O-methyl
  misc_feature (11)..(14): 2'-deoxy-2'Fluoro
  misc_feature (15)..(15): 2'-O-methyl
  misc_feature (16)..(17): 2'-deoxy-2'Fluoro
  misc_feature (18)..(21): 2'-O-methyl
  misc_feature (1)..(19): ribonucleotide unmodified or modified as described for this sequence
cucgcaagcacccuaucaggc

SEQ ID NO: 2103 - DNA, 21 bp, Artificial Sequence
  Description of Artificial Sequence: Target Sequence/siNA antisense region (stab36)
  misc_feature (4)..(5): 2'-deoxy-2'Fluoro
  misc_feature (6)..(6): 2'-O-methyl
  misc_feature (7)..(7): 2'-deoxy-2'Fluoro
  misc_feature (8)..(11): 2'-O-methyl
  misc_feature (12)..(17): 2'-deoxy-2'Fluoro
  misc_feature (18)..(21): 2'-O-methyl
  misc_feature (1)..(19): ribonucleotide unmodified or modified as described for this sequence
ggucuacgagaccucccgggg

SEQ ID NO: 2104 - DNA, 21 bp, Artificial Sequence
  Description of Artificial Sequence: Target Sequence/siNA sense region (stab07B)
  misc_feature (1)..(1): 5'-3 attached terminal deoxyabasic moiety, inverted abasic, inverted nucleotide or other terminal cap that is optionally present
  misc_feature (21)..(21): 3'-3 attached terminal deoxyabasic moiety, inverted abasic, inverted nucleotide or other terminal cap that is optionally present
  misc_feature (1)..(1): 2'-deoxy
  misc_feature (2)..(2): 2'-deoxy-2'Fluoro
  misc_feature (3)..(8): 2'-deoxy
  misc_feature (11)..(12): 2'-deoxy-2'Fluoro
  misc_feature (13)..(13): 2'-deoxy
  misc_feature (14)..(14): 2'-deoxy-2'Fluoro
  misc_feature (15)..(16): 2'-deoxy
  misc_feature (17)..(17): 2'-deoxy-2'Fluoro
  misc_feature (18)..(18): 2'-deoxy
  misc_feature (19)..(19): 2'-deoxy-2'Fluoro
  misc_feature (1)..(19): ribonucleotide unmodified or modified as described for this sequence
gcgaaaggccuugugguactt

SEQ ID NO: 2105 - DNA, 21 bp, Artificial Sequence
  Description of Artificial Sequence: Target Sequence/siNA sense region (stab07B)
  misc_feature (1)..(1): 5'-3 attached terminal deoxyabasic moiety, inverted abasic, inverted nucleotide or other terminal cap that is optionally present
  misc_feature (21)..(21): 3'-3 attached terminal deoxyabasic moiety, inverted abasic, inverted nucleotide or other terminal cap that is optionally present
  misc_feature (1)..(2): 2'-deoxy-2'Fluoro
  misc_feature (3)..(4): 2'-deoxy
  misc_feature (5)..(5): 2'-deoxy-2'Fluoro
  misc_feature (6)..(8): 2'-deoxy
  misc_feature (11)..(11): 2'-deoxy
  misc_feature (12)..(14): 2'-deoxy-2'Fluoro
  misc_feature (15)..(15): 2'-deoxy
  misc_feature (16)..(16): 2'-deoxy-2'Fluoro
  misc_feature (17)..(19): 2'-deoxy
  misc_feature (1)..(19): ribonucleotide unmodified or modified as described for this sequence
cugauagggugcuugcgagtt

SEQ ID NO: 2106 - DNA, 21 bp, Artificial Sequence
  Description of Artificial Sequence: Target Sequence/siNA sense region (stab07B)
  misc_feature (1)..(1): 5'-3 attached terminal deoxyabasic moiety, inverted abasic, inverted nucleotide or other terminal cap that is optionally present
  misc_feature (21)..(21): 3'-3 attached terminal deoxyabasic moiety, inverted abasic, inverted nucleotide or other terminal cap that is optionally present
  misc_feature (1)..(2): 2'-deoxy-2'Fluoro
  misc_feature (3)..(8): 2'-deoxy
  misc_feature (11)..(12): 2'-deoxy-2'Fluoro
  misc_feature (13)..(13): 2'-deoxy
  misc_feature (14)..(14): 2'-deoxy-2'Fluoro
  misc_feature (15)..(17): 2'-deoxy
  misc_feature (18)..(19): 2'-deoxy-2'Fluoro
  misc_feature (1)..(19): ribonucleotide unmodified or modified as described for this sequence
ccgggaggucucguagacctt

SEQ ID NO: 2107 - DNA, 21 bp, Artificial Sequence
  Description of Artificial Sequence: Target Sequence/siNA antisense region (stab35)
  misc_feature (4)..(5): 2'-deoxy-2'Fluoro
  misc_feature (6)..(7): 2'-O-methyl
  misc_feature (8)..(11): 2'-deoxy-2'Fluoro
  misc_feature (12)..(13): 2'-O-methyl
  misc_feature (14)..(17): 2'-deoxy-2'Fluoro
  misc_feature (18)..(21): 2'-O-methyl
  misc_feature (1)..(19): ribonucleotide unmodified or modified as described for this sequence
ggucuagcucuggucccgguu

SEQ ID NO: 2108 - DNA, 19 bp, Artificial Sequence
  Description of Artificial Sequence: Target Sequence/siNA sense region (stab07C)
  misc_feature (1)..(1): 5'-3 attached terminal deoxyabasic moiety, inverted abasic, inverted nucleotide or other terminal cap that is optionally present
  misc_feature (19)..(19): 3'-3 attached terminal deoxyabasic moiety, inverted abasic, inverted nucleotide or other terminal cap that is optionally present
  misc_feature (1)..(1): 2'-deoxy
  misc_feature (2)..(2): 2'-deoxy-2'Fluoro
  misc_feature (3)..(8): 2'-deoxy
  misc_feature (11)..(12): 2'-deoxy-2'Fluoro
  misc_feature (13)..(13): 2'-deoxy
  misc_feature (14)..(14): 2'-deoxy-2'Fluoro
  misc_feature (15)..(16): 2'-deoxy
  misc_feature (17)..(17): 2'-deoxy-2'Fluoro
  misc_feature (18)..(18): 2'-deoxy
  misc_feature (19)..(19): 2'-deoxy-2'Fluoro
  misc_feature (1)..(19): ribonucleotide unmodified or modified as described for this sequence
gcgaaaggccuugugguac

SEQ ID NO: 2109 - DNA, 19 bp, Artificial Sequence
  Description of Artificial Sequence: Target Sequence/siNA sense region (stab07C)
  misc_feature (1)..(1): 5'-3 attached terminal deoxyabasic moiety, inverted abasic, inverted nucleotide or other terminal cap that is optionally present
  misc_feature (19)..(19): 3'-3 attached terminal deoxyabasic moiety, inverted abasic, inverted nucleotide or other terminal cap that is optionally present
  misc_feature (1)..(2): 2'-deoxy-2'Fluoro
  misc_feature (3)..(4): 2'-deoxy
  misc_feature (5)..(5): 2'-deoxy-2'Fluoro
  misc_feature (6)..(8): 2'-deoxy
  misc_feature (11)..(11): 2'-deoxy
  misc_feature (12)..(14): 2'-deoxy-2'Fluoro
  misc_feature (15)..(15): 2'-deoxy
  misc_feature (16)..(16): 2'-deoxy-2'Fluoro
  misc_feature (17)..(19): 2'-deoxy
  misc_feature (1)..(19): ribonucleotide unmodified or modified as described for this sequence
cugauagggugcuugcgag

SEQ ID NO: 2110 - DNA, 19 bp, Artificial Sequence
  Description of Artificial Sequence: Target Sequence/siNA sense region (stab07C)
  misc_feature (1)..(1): 5'-3 attached terminal deoxyabasic moiety, inverted abasic, inverted nucleotide or other terminal cap that is optionally present
  misc_feature (19)..(19): 3'-3 attached terminal deoxyabasic moiety, inverted abasic, inverted nucleotide or other terminal cap that is optionally present
  misc_feature (1)..(2): 2'-deoxy-2'Fluoro
  misc_feature (3)..(8): 2'-deoxy
  misc_feature (11)..(12): 2'-deoxy-2'Fluoro
  misc_feature (13)..(13): 2'-deoxy
  misc_feature (14)..(14): 2'-deoxy-2'Fluoro
  misc_feature (15)..(17): 2'-deoxy
  misc_feature (18)..(19): 2'-deoxy-2'Fluoro
  misc_feature (1)..(19): ribonucleotide unmodified or modified as described for this sequence
ccgggaggucucguagacc

SEQ ID NO: 2111 - DNA, 19 bp, Artificial Sequence
  Description of Artificial Sequence: Target Sequence/siNA sense region (stab07D)
  misc_feature (1)..(1): 5'-3 attached terminal deoxyabasic moiety, inverted abasic, inverted nucleotide or other terminal cap that is optionally present
  misc_feature (1)..(1): 2'-deoxy
  misc_feature (2)..(2): 2'-deoxy-2'Fluoro
  misc_feature (3)..(8): 2'-deoxy
  misc_feature (11)..(12): 2'-deoxy-2'Fluoro
  misc_feature (13)..(13): 2'-deoxy
  misc_feature (14)..(14): 2'-deoxy-2'Fluoro
  misc_feature (15)..(16): 2'-deoxy
  misc_feature (17)..(17): 2'-deoxy-2'Fluoro
  misc_feature (18)..(18): 2'-deoxy
  misc_feature (19)..(19): 2'-deoxy-2'Fluoro
  misc_feature (1)..(19): ribonucleotide unmodified or modified as described for this sequence
gcgaaaggccuugugguac

SEQ ID NO: 2112 - DNA, 19 bp, Artificial Sequence
  Description of Artificial Sequence: Target Sequence/siNA sense region (stab07D)
  misc_feature (1)..(1): 5'-3 attached terminal deoxyabasic moiety, inverted abasic, inverted nucleotide or other terminal cap that is optionally present
  misc_feature (1)..(2): 2'-deoxy-2'Fluoro
  misc_feature (3)..(4): 2'-deoxy
  misc_feature (5)..(5): 2'-deoxy-2'Fluoro
  misc_feature (6)..(8): 2'-deoxy
  misc_feature (11)..(11): 2'-deoxy
  misc_feature (12)..(14): 2'-deoxy-2'Fluoro
  misc_feature (15)..(15): 2'-deoxy
  misc_feature (16)..(16): 2'-deoxy-2'Fluoro
  misc_feature (17)..(19): 2'-deoxy
  misc_feature (1)..(19): ribonucleotide unmodified or modified as described for this sequence
cugauagggugcuugcgag

SEQ ID NO: 2113 - DNA, 19 bp, Artificial Sequence
  Description of Artificial Sequence: Target Sequence/siNA sense region (stab07)
  misc_feature (1)..(1): 5'-3 attached terminal deoxyabasic moiety, inverted abasic, inverted nucleotide or other terminal cap that is optionally present
  misc_feature (1)..(2): 2'-deoxy-2'Fluoro
  misc_feature (3)..(8): 2'-deoxy
  misc_feature (11)..(12): 2'-deoxy-2'Fluoro
  misc_feature (13)..(13): 2'-deoxy
  misc_feature (14)..(14): 2'-deoxy-2'Fluoro
  misc_feature (15)..(17): 2'-deoxy
  misc_feature (18)..(19): 2'-deoxy-2'Fluoro
  misc_feature (1)..(19): ribonucleotide unmodified or modified as described for this sequence
ccgggaggucucguagacc

SEQ ID NO: 2114 - DNA, 21 bp, Artificial Sequence
  Description of Artificial Sequence: Target Sequence/siNA sense region (stab07B)
  misc_feature (1)..(1): 5'-3 attached terminal deoxyabasic moiety, inverted abasic, inverted nucleotide or other terminal cap that is optionally present
  misc_feature (21)..(21): 3'-3 attached terminal deoxyabasic moiety, inverted abasic, inverted nucleotide or other terminal cap that is optionally present
  misc_feature (1)..(4): 2'-deoxy-2'Fluoro
  misc_feature (5)..(5): 2'-deoxy
  misc_feature (6)..(6): 2'-deoxy-2'Fluoro
  misc_feature (7)..(7): 2'-deoxy
  misc_feature (8)..(8): 2'-deoxy-2'Fluoro
  misc_feature (11)..(14): 2'-deoxy
  misc_feature (15)..(15): 2'-deoxy-2'Fluoro
  misc_feature (16)..(16): 2'-deoxy
  misc_feature (17)..(19): 2'-deoxy-2'Fluoro
  misc_feature (1)..(19): ribonucleotide unmodified or modified as described for this sequence
cuucacgcagaaagcgucutt

SEQ ID NO: 2115 - DNA, 21 bp, Artificial Sequence
  Description of Artificial Sequence: Target Sequence/siNA sense region (stab07B)
  misc_feature (1)..(1): 5'-3 attached terminal deoxyabasic moiety, inverted abasic, inverted nucleotide or other terminal cap that is optionally present
  misc_feature (21)..(21): 3'-3 attached terminal deoxyabasic moiety, inverted abasic, inverted nucleotide or other terminal cap that is optionally present
  misc_feature (1)..(1): 2'-deoxy
  misc_feature (2)..(2): 2'-deoxy-2'Fluoro
  misc_feature (3)..(3): 2'-deoxy
  misc_feature (4)..(6): 2'-deoxy-2'Fluoro
  misc_feature (7)..(8): 2'-deoxy
  misc_feature (11)..(11): 2'-deoxy
  misc_feature (12)..(12): 2'-deoxy-2'Fluoro
  misc_feature (13)..(14): 2'-deoxy
  misc_feature (15)..(15): 2'-deoxy-2'Fluoro
  misc_feature (16)..(16): 2'-deoxy
  misc_feature (17)..(18): 2'-deoxy-2'Fluoro
  misc_feature (19)..(19): 2'-deoxy
  misc_feature (1)..(19): ribonucleotide unmodified or modified as described for this sequence
gcgucuagccauggcguuatt

SEQ ID NO: 2116 - DNA, 21 bp, Artificial Sequence
  Description of Artificial Sequence: Target Sequence/siNA sense region (stab07B)
  misc_feature (1)..(1): 5'-3 attached terminal deoxyabasic moiety, inverted abasic, inverted nucleotide or other terminal cap that is optionally present
  misc_feature (21)..(21): 3'-3 attached terminal deoxyabasic moiety, inverted abasic, inverted nucleotide or other terminal cap that is optionally present
  misc_feature (1)..(2): 2'-deoxy-2'Fluoro
  misc_feature (3)..(8): 2'-deoxy
  misc_feature (11)..(11): 2'-deoxy-2'Fluoro
  misc_feature (12)..(12): 2'-deoxy
  misc_feature (13)..(13): 2'-deoxy-2'Fluoro
  misc_feature (14)..(15): 2'-deoxy
  misc_feature (16)..(16): 2'-deoxy-2'Fluoro
  misc_feature (17)..(18): 2'-deoxy
  misc_feature (19)..(19): 2'-deoxy-2'Fluoro
  misc_feature (1)..(19): ribonucleotide unmodified or modified as described for this sequence
ccgggagagccauaguggutt

SEQ ID NO: 2117 - DNA, 21 bp, Artificial Sequence
  Description of Artificial Sequence: Target Sequence/siNA sense region (stab07B)
  misc_feature (1)..(1): 5'-3 attached terminal deoxyabasic moiety, inverted abasic, inverted nucleotide or other terminal cap that is optionally present
  misc_feature (21)..(21): 3'-3 attached terminal deoxyabasic moiety, inverted abasic, inverted nucleotide or other terminal cap that is optionally present
  misc_feature (1)..(1): 2'-deoxy
  misc_feature (2)..(4): 2'-deoxy-2'Fluoro
  misc_feature (5)..(5): 2'-deoxy
  misc_feature (6)..(6): 2'-deoxy-2'Fluoro
  misc_feature (7)..(8): 2'-deoxy
  misc_feature (11)..(12): 2'-deoxy-2'Fluoro
  misc_feature (13)..(14): 2'-deoxy
  misc_feature (15)..(15): 2'-deoxy-2'Fluoro
  misc_feature (16)..(18): 2'-deoxy
  misc_feature (19)..(19): 2'-deoxy-2'Fluoro
  misc_feature (1)..(19): ribonucleotide unmodified or modified as described for this sequence
gucugcggaaccggugagutt

SEQ ID NO: 2118 - DNA, 21 bp, Artificial Sequence
  Description of Artificial Sequence: Target Sequence/siNA sense region (stab07B)
  misc_feature (1)..(1): 5'-3 attached terminal deoxyabasic moiety, inverted abasic, inverted nucleotide or other terminal cap that is optionally present
  misc_feature (21)..(21): 3'-3 attached terminal deoxyabasic moiety, inverted abasic, inverted nucleotide or other terminal cap that is optionally present
  misc_feature (1)..(3): 2'-deoxy-2'Fluoro
  misc_feature (4)..(5): 2'-deoxy
  misc_feature (6)..(6): 2'-deoxy-2'Fluoro
  misc_feature (7)..(8): 2'-deoxy
  misc_feature (11)..(11): 2'-deoxy-2'Fluoro
  misc_feature (12)..(12): 2'-deoxy
  misc_feature (13)..(15): 2'-deoxy-2'Fluoro
  misc_feature (16)..(16): 2'-deoxy
  misc_feature (17)..(17): 2'-deoxy-2'Fluoro
  misc_feature (18)..(19): 2'-deoxy
  misc_feature (1)..(19): ribonucleotide unmodified or modified as described for this sequence
ccugauagggugcuugcgatt

SEQ ID NO: 2119 - DNA, 21 bp, Artificial Sequence
  Description of Artificial Sequence: Target Sequence/siNA sense region (stab07B)
  misc_feature (1)..(1): 5'-3 attached terminal deoxyabasic moiety, inverted abasic, inverted nucleotide or other terminal cap that is optionally present
  misc_feature (21)..(21): 3'-3 attached terminal deoxyabasic moiety, inverted abasic, inverted nucleotide or other terminal cap that is optionally present
  misc_feature (1)..(6): 2'-deoxy
  misc_feature (7)..(8): 2'-deoxy-2'Fluoro
  misc_feature (11)..(11): 2'-deoxy
  misc_feature (12)..(12): 2'-deoxy-2'Fluoro
  misc_feature (13)..(15): 2'-deoxy
  misc_feature (16)..(17): 2'-deoxy-2'Fluoro
  misc_feature (18)..(18): 2'-deoxy
  misc_feature (19)..(19): 2'-deoxy-2'Fluoro
  misc_feature (1)..(19): ribonucleotide unmodified or modified as described for this sequence
gggaggucucguagaccgutt

SEQ ID NO: 2120 - DNA, 21 bp, Artificial Sequence
  Description of Artificial Sequence: Target Sequence/siNA sense region (stab09)
  misc_feature (1)..(1): 5'-3 attached terminal deoxyabasic moiety, inverted abasic, inverted nucleotide or other terminal cap that is optionally present
  misc_feature (21)..(21): 3'-3 attached terminal deoxyabasic moiety, inverted abasic, inverted nucleotide or other terminal cap that is optionally present
  misc_feature (1)..(19): ribonucleotide unmodified or modified as described for this sequence
cuucacgcagaaagcgucutt

SEQ ID NO: 2121 - DNA, 21 bp, Artificial Sequence
  Description of Artificial Sequence: Target Sequence/siNA sense region (stab09)
  misc_feature (1)..(1): 5'-3 attached terminal deoxyabasic moiety, inverted abasic, inverted nucleotide or other terminal cap that is optionally present
  misc_feature (21)..(21): 3'-3 attached terminal deoxyabasic moiety, inverted abasic, inverted nucleotide or other terminal cap that is optionally present
  misc_feature (1)..(19): ribonucleotide unmodified or modified as described for this sequence
gcgucuagccauggcguuatt

SEQ ID NO: 2122 - DNA, 21 bp, Artificial Sequence
  Description of Artificial Sequence: Target Sequence/siNA sense region (stab09)
  misc_feature (1)..(1): 5'-3 attached terminal deoxyabasic moiety, inverted abasic, inverted nucleotide or other terminal cap that is optionally present
  misc_feature (21)..(21): 3'-3 attached terminal deoxyabasic moiety, inverted abasic, inverted nucleotide or other terminal cap that is optionally present
  misc_feature (1)..(19): ribonucleotide unmodified or modified as described for this sequence
ccgggagagccauaguggutt

SEQ ID NO: 2123 - DNA, 21 bp, Artificial Sequence
  Description of Artificial Sequence: Target Sequence/siNA sense region (stab09)
  misc_feature (1)..(1): 5'-3 attached terminal deoxyabasic moiety, inverted abasic, inverted nucleotide or other terminal cap that is optionally present
  misc_feature (21)..(21): 3'-3 attached terminal deoxyabasic moiety, inverted abasic, inverted nucleotide or other terminal cap that is optionally present
  misc_feature (1)..(19): ribonucleotide unmodified or modified as described for this sequence
gucugcggaaccggugagutt

SEQ ID NO: 2124 - DNA, 21 bp, Artificial Sequence
  Description of Artificial Sequence: Target Sequence/siNA sense region (stab09)
  misc_feature (1)..(1): 5'-3 attached terminal deoxyabasic moiety, inverted abasic, inverted nucleotide or other terminal cap that is optionally present
  misc_feature (21)..(21): 3'-3 attached terminal deoxyabasic moiety, inverted abasic, inverted nucleotide or other terminal cap that is optionally present
  misc_feature (1)..(19): ribonucleotide unmodified or modified as described for this sequence
ccugauagggugcuugcgatt

SEQ ID NO: 2125 - DNA, 21 bp, Artificial Sequence
  Description of Artificial Sequence: Target Sequence/siNA sense region (stab09)
  misc_feature (1)..(1): 5'-3 attached terminal deoxyabasic moiety, inverted abasic, inverted nucleotide or other terminal cap that is optionally present
  misc_feature (21)..(21): 3'-3 attached terminal deoxyabasic moiety, inverted abasic, inverted nucleotide or other terminal cap that is optionally present
  misc_feature (1)..(19): ribonucleotide unmodified or modified as described for this sequence
gggaggucucguagaccgutt

SEQ ID NO: 2126 - DNA, 21 bp, Artificial Sequence
  Description of Artificial Sequence: Target Sequence/siNA antisense region (stab10)
  misc_feature (20)..(20): Phosphorothioate or Phosphorodithioate 3'-Internucleotide Linkage (optionally present)
  misc_feature (1)..(19): ribonucleotide unmodified or modified as described for this sequence
agacgcuuucugcgugaagtt

SEQ ID NO: 2127 - DNA, 21 bp, Artificial Sequence
  Description of Artificial Sequence: Target Sequence/siNA antisense region (stab10)
  misc_feature (20)..(20): Phosphorothioate or Phosphorodithioate 3'-Internucleotide Linkage (optionally present)
  misc_feature (1)..(19): ribonucleotide unmodified or modified as described for this sequence
uaacgccauggcuagacgctt

SEQ ID NO: 2128 - DNA, 21 bp, Artificial Sequence
  Description of Artificial Sequence: Target Sequence/siNA antisense region (stab10)
  misc_feature (20)..(20): Phosphorothioate or Phosphorodithioate 3'-Internucleotide Linkage (optionally present)
  misc_feature (1)..(19): ribonucleotide unmodified or modified as described for this sequence
accacuauggcucucccggtt

SEQ ID NO: 2129 - DNA, 21 bp, Artificial Sequence
  Description of Artificial Sequence: Target Sequence/siNA antisense region (stab10)
  misc_feature (20)..(20): Phosphorothioate or Phosphorodithioate 3'-Internucleotide Linkage (optionally present)
  misc_feature (1)..(19): ribonucleotide unmodified or modified as described for this sequence
acucaccgguuccgcagactt

SEQ ID NO: 2130 - DNA, 21 bp, Artificial Sequence
  Description of Artificial Sequence: Target Sequence/siNA antisense region (stab10)
  misc_feature (20)..(20): Phosphorothioate or Phosphorodithioate 3'-Internucleotide Linkage (optionally present)
  misc_feature (1)..(19): ribonucleotide unmodified or modified as described for this sequence
ucgcaagcacccuaucaggtt

SEQ ID NO: 2131 - DNA, 21 bp, Artificial Sequence
  Description of Artificial Sequence: Target Sequence/siNA antisense region (stab10)
  misc_feature (20)..(20): Phosphorothioate or Phosphorodithioate 3'-Internucleotide Linkage (optionally present)
  misc_feature (1)..(19): ribonucleotide unmodified or modified as described for this sequence
acggucuacgagaccuccctt

SEQ ID NO: 2132 - DNA, 21 bp, Artificial Sequence
  Description of Artificial Sequence: Target Sequence/siNA antisense region (stab25)
  misc_feature (20)..(20): Phosphorothioate or Phosphorodithioate 3'-Internucleotide Linkage (optionally present)
  misc_feature (4)..(4): 2'-deoxy-2'Fluoro
  misc_feature (6)..(11): 2'-deoxy-2'Fluoro
  misc_feature (13)..(13): 2'-deoxy-2'Fluoro
  misc_feature (15)..(15): 2'-deoxy-2'Fluoro
  misc_feature (1)..(19): ribonucleotide unmodified or modified as described for this sequence
agacgcuuucugcgugaagtt

SEQ ID NO: 2133 - DNA, 21 bp, Artificial Sequence
  Description of Artificial Sequence: Target Sequence/siNA antisense region (stab25)
  misc_feature (20)..(20): Phosphorothioate or Phosphorodithioate 3'-Internucleotide Linkage (optionally present)
  misc_feature (1)..(1): 2'-deoxy-2'Fluoro
  misc_feature (4)..(4): 2'-deoxy-2'Fluoro
  misc_feature (6)..(7): 2'-deoxy-2'Fluoro
  misc_feature (9)..(9): 2'-deoxy-2'Fluoro
  misc_feature (12)..(13): 2'-deoxy-2'Fluoro
  misc_feature (17)..(17): 2'-deoxy-2'Fluoro
  misc_feature (19)..(19): 2'-deoxy-2'Fluoro
  misc_feature (1)..(19): ribonucleotide unmodified or modified as described for this sequence
uaacgccauggcuagacgctt

SEQ ID NO: 2134 - DNA, 21 bp, Artificial Sequence
  Description of Artificial Sequence: Target Sequence/siNA antisense region (stab25)
  misc_feature (20)..(20): Phosphorothioate or Phosphorodithioate 3'-Internucleotide Linkage (optionally present)
  misc_feature (2)..(3): 2'-deoxy-2'Fluoro
  misc_feature (5)..(6): 2'-deoxy-2'Fluoro
  misc_feature (8)..(8): 2'-deoxy-2'Fluoro
  misc_feature (11)..(17): 2'-deoxy-2'Fluoro
  misc_feature (1)..(19): ribonucleotide unmodified or modified as described for this sequence
accacuauggcucucccggtt

SEQ ID NO: 2135 - DNA, 21 bp, Artificial Sequence
  Description of Artificial Sequence: Target Sequence/siNA antisense region (stab25)
  misc_feature (20)..(20): Phosphorothioate or Phosphorodithioate 3'-Internucleotide Linkage (optionally present)
  misc_feature (2)..(4): 2'-deoxy-2'Fluoro
  misc_feature (6)..(7): 2'-deoxy-2'Fluoro
  misc_feature (10)..(13): 2'-deoxy-2'Fluoro
  misc_feature (15)..(15): 2'-deoxy-2'Fluoro
  misc_feature (19)..(19): 2'-deoxy-2'Fluoro
  misc_feature (1)..(19): ribonucleotide unmodified or modified as described for this sequence
acucaccgguuccgcagactt

SEQ ID NO: 2136 - DNA, 21 bp, Artificial Sequence
  Description of Artificial Sequence: Target Sequence/siNA antisense region (stab25)
  misc_feature (20)..(20): Phosphorothioate or Phosphorodithioate 3'-Internucleotide Linkage (optionally present)
  misc_feature (1)..(2): 2'-deoxy-2'Fluoro
  misc_feature (4)..(4): 2'-deoxy-2'Fluoro
  misc_feature (8)..(8): 2'-deoxy-2'Fluoro
  misc_feature (10)..(13): 2'-deoxy-2'Fluoro
  misc_feature (15)..(16): 2'-deoxy-2'Fluoro
  misc_feature (1)..(19): ribonucleotide unmodified or modified as described for this sequence
ucgcaagcacccuaucaggtt

SEQ ID NO: 2137 - DNA, 21 bp, Artificial Sequence
  Description of Artificial Sequence: Target Sequence/siNA antisense region (stab25)
  misc_feature (20)..(20): Phosphorothioate or Phosphorodithioate 3'-Internucleotide Linkage (optionally present)
  misc_feature (2)..(2): 2'-deoxy-2'Fluoro
  misc_feature (5)..(7): 2'-deoxy-2'Fluoro
  misc_feature (9)..(9): 2'-deoxy-2'Fluoro
  misc_feature (14)..(19): 2'-deoxy-2'Fluoro
  misc_feature (1)..(19): ribonucleotide unmodified or modified as described for this sequence
acggucuacgagaccuccctt

SEQ ID NO: 2138 - DNA, 20 bp, Artificial Sequence
  Description of Artificial Sequence: Target Sequence/siNA sense region (stab07iB19)
  misc_feature (1)..(1): 5'-3 attached terminal deoxyabasic moiety, inverted abasic, inverted nucleotide or other terminal cap that is optionally present
  misc_feature (20)..(20): 3'-3 attached terminal deoxyabasic moiety, inverted abasic, inverted nucleotide or other terminal cap that is optionally present
  misc_feature (1)..(2): 2'-deoxy-2'Fluoro
  misc_feature (3)..(8): 2'-deoxy
  misc_feature (9)..(12): 2'-deoxy-2'Fluoro
  misc_feature (13)..(13): 2'-deoxy
  misc_feature (14)..(14): 2'-deoxy-2'Fluoro
  misc_feature (15)..(17): 2'-deoxy
  misc_feature (18)..(18): 2'-deoxy-2'Fluoro
  misc_feature (1)..(17): ribonucleotide unmodified or modified as described for this sequence
  misc_feature (17)..(18): inverted deoxy abasic moiety between nucleotides
ccgggaggucucguagactt

SEQ ID NO: 2139 - DNA, 20 bp, Artificial Sequence
  Description of Artificial Sequence: Target Sequence/siNA sense region (stab07iB19)
  misc_feature (1)..(1): 5'-3 attached terminal deoxyabasic moiety, inverted abasic, inverted nucleotide or other terminal cap that is optionally present
  misc_feature (20)..(20): 3'-3 attached terminal deoxyabasic moiety, inverted abasic, inverted nucleotide or other terminal cap that is optionally present
  misc_feature (1)..(2): 2'-deoxy-2'Fluoro
  misc_feature (3)..(4): 2'-deoxy
  misc_feature (5)..(5): 2'-deoxy-2'Fluoro
  misc_feature (6)..(9): 2'-deoxy
  misc_feature (10)..(10): 2'-deoxy-2'Fluoro
  misc_feature (11)..(11): 2'-deoxy
  misc_feature (12)..(14): 2'-deoxy-2'Fluoro
  misc_feature (15)..(15): 2'-deoxy
  misc_feature (16)..(16): 2'-deoxy-2'Fluoro
  misc_feature (17)..(18): 2'-deoxy
  misc_feature (1)..(17): ribonucleotide unmodified or modified as described for this sequence
  misc_feature (17)..(18): inverted deoxy abasic moiety between nucleotides
cugauagggugcuugcgatt

SEQ ID NO: 2140 - RNA, 20 nt, Artificial Sequence
  Description of Artificial Sequence: Target Sequence/siNA antisense region (stab36iB19)
  misc_feature (4)..(5): 2'-deoxy-2'Fluoro
  misc_feature (6)..(6): 2'-O-methyl
  misc_feature (7)..(7): 2'-deoxy-2'Fluoro
  misc_feature (8)..(11): 2'-O-methyl
  misc_feature (12)..(17): 2'-deoxy-2'Fluoro
  misc_feature (18)..(18): 2'-O-methyl
  misc_feature (19)..(20): 2'-O-methyl
  misc_feature (17)..(18): inverted deoxy abasic moiety between nucleotides
ggucuacgagaccucccggg

SEQ ID NO: 2141 - RNA, 20 nt, Artificial Sequence
  Description of Artificial Sequence: Target Sequence/siNA antisense region (stab36iB19)
  misc_feature (4)..(4): 2'-O-methyl
  misc_feature (5)..(5): 2'-deoxy-2'Fluoro
  misc_feature (6)..(8): 2'-O-methyl
  misc_feature (9)..(9): 2'-deoxy-2'Fluoro
  misc_feature (10)..(10): 2'-O-methyl
  misc_feature (11)..(14): 2'-deoxy-2'Fluoro
  misc_feature (15)..(15): 2'-O-methyl
  misc_feature (16)..(17): 2'-deoxy-2'Fluoro
  misc_feature (18)..(18): 2'-O-methyl
  misc_feature (19)..(20): 2'-O-methyl
  misc_feature (17)..(18): inverted deoxy abasic moiety between nucleotides
cucgcaagcacccuaucagc

SEQ ID NO: 2142 - DNA, 20 bp, Artificial Sequence
  Description of Artificial Sequence: Target Sequence/siNA sense region (stab07iB1)
  misc_feature (1)..(1): 5'-3 attached terminal deoxyabasic moiety, inverted abasic, inverted nucleotide or other terminal cap that is optionally present
  misc_feature (20)..(20): 3'-3 attached terminal deoxyabasic moiety, inverted abasic, inverted nucleotide or other terminal cap that is optionally present
  misc_feature (1)..(1): 2'-deoxy-2'Fluoro
  misc_feature (2)..(7): 2'-deoxy
  misc_feature (8)..(11): 2'-deoxy-2'Fluoro
  misc_feature (12)..(12): 2'-deoxy
  misc_feature (13)..(13): 2'-deoxy-2'Fluoro
  misc_feature (14)..(16): 2'-deoxy
  misc_feature (17)..(17): 2'-deoxy-2'Fluoro
  misc_feature (1)..(18): ribonucleotide unmodified or modified as described for this sequence
cgggaggucucguagacctt

SEQ ID NO: 2143 - DNA, 20 bp, Artificial Sequence
  Description of Artificial Sequence: Target Sequence/siNA sense region (stab07iB1)
  misc_feature (1)..(1): 5'-3 attached terminal deoxyabasic moiety, inverted abasic, inverted nucleotide or other terminal cap that is optionally present
  misc_feature (20)..(20): 3'-3 attached terminal deoxyabasic moiety, inverted abasic, inverted nucleotide or other terminal cap that is optionally present
  misc_feature (1)..(1): 2'-deoxy-2'Fluoro
  misc_feature (4)..(4): 2'-deoxy-2'Fluoro
  misc_feature (9)..(9): 2'-deoxy-2'Fluoro
  misc_feature (11)..(13): 2'-deoxy-2'Fluoro
  misc_feature (15)..(15): 2'-deoxy-2'Fluoro
  misc_feature (1)..(18): ribonucleotide unmodified or modified as described for this sequence
ugauagggugcuugcgagtt

SEQ ID NO: 2144 - RNA, 20 nt, Artificial Sequence
  Description of Artificial Sequence: Target Sequence/siNA antisense region (stab36iB1)
  misc_feature (1)..(1): 5'-3 attached terminal deoxyabasic moiety, inverted abasic, inverted nucleotide or other terminal cap that is optionally present
  misc_feature (1)..(2): 2'-O-methyl
  misc_feature (3)..(4): 2'-deoxy-2'Fluoro
  misc_feature (5)..(5): 2'-O-methyl
  misc_feature (6)..(6): 2'-deoxy-2'Fluoro
  misc_feature (7)..(10): 2'-O-methyl
  misc_feature (11)..(16): 2'-deoxy-2'Fluoro
  misc_feature (17)..(20): 2'-O-methyl
gucuacgagaccucccgggg

SEQ ID NO: 2145 - RNA, 20 nt, Artificial Sequence
  Description of Artificial Sequence: Target Sequence/siNA antisense region (stab36iB1)
  misc_feature (1)..(1): 5'-3 attached terminal deoxyabasic moiety, inverted abasic, inverted nucleotide or other terminal cap that is optionally present
  misc_feature (3)..(3): 2'-O-methyl
  misc_feature (4)..(4): 2'-deoxy-2'Fluoro
  misc_feature (5)..(7): 2'-O-methyl
  misc_feature (8)..(8): 2'-deoxy-2'Fluoro
  misc_feature (9)..(9): 2'-O-methyl
  misc_feature (10)..(13): 2'-deoxy-2'Fluoro
  misc_feature (14)..(14): 2'-O-methyl
  misc_feature (15)..(16): 2'-deoxy-2'Fluoro
  misc_feature (17)..(20): 2'-O-methyl
ucgcaagcacccuaucaggc

SEQ ID NO: 2146 - DNA, 20 bp, Artificial Sequence
  Description of Artificial Sequence: Target Sequence/siNA sense region (stab07iB9)
  misc_feature (1)..(1): 5'-3 attached terminal deoxyabasic moiety, inverted abasic, inverted nucleotide or other terminal cap that is optionally present
  misc_feature (20)..(20): 3'-3 attached terminal deoxyabasic moiety, inverted abasic, inverted nucleotide or other terminal cap that is optionally present
  misc_feature (1)..(2): 2'-deoxy-2'Fluoro
  misc_feature (3)..(8): 2'-deoxy
  misc_feature (9)..(11): 2'-deoxy-2'Fluoro
  misc_feature (12)..(12): 2'-deoxy
  misc_feature (13)..(13): 2'-deoxy-2'Fluoro
  misc_feature (14)..(16): 2'-deoxy
  misc_feature (17)..(18): 2'-deoxy-2'Fluoro
  misc_feature (1)..(18): ribonucleotide unmodified or modified as described for this sequence
ccgggaggcucguagacctt

SEQ ID NO: 2147 - DNA, 20 bp, Artificial Sequence
  Description of Artificial Sequence: Target Sequence/siNA sense region (stab07iB9)
  misc_feature (1)..(1): 5'-3 attached terminal deoxyabasic moiety, inverted abasic, inverted nucleotide or other terminal cap that is optionally present
  misc_feature (20)..(20): 3'-3 attached terminal deoxyabasic moiety, inverted abasic, inverted nucleotide or other terminal cap that is optionally present
  misc_feature (1)..(2): 2'-deoxy-2'Fluoro
  misc_feature (3)..(4): 2'-deoxy
  misc_feature (5)..(5): 2'-deoxy-2'Fluoro
  misc_feature (1)..(18): ribonucleotide unmodified or modified as described for this sequence
cugauaggugcuugcgagtt

SEQ ID NO: 2148 - RNA, 20 nt, Artificial Sequence
  Description of Artificial Sequence: Target Sequence/siNA antisense region (stab36iB9)
  misc_feature (4)..(5): 2'-deoxy-2'Fluoro
  misc_feature (6)..(6): 2'-O-methyl
  misc_feature (7)..(7): 2'-deoxy-2'Fluoro
  misc_feature (8)..(8): 2'-O-methyl
  misc_feature (9)..(10): 2'-O-methyl
  misc_feature (11)..(16): 2'-deoxy-2'Fluoro
  misc_feature (17)..(20): 2'-O-methyl
ggucuacggaccucccgggg

SEQ ID NO: 2149 - RNA, 20 nt, Artificial Sequence
  Description of Artificial Sequence: Target Sequence/siNA antisense region (stab36iB9)
  misc_feature (4)..(4): 2'-O-methyl
  misc_feature (5)..(5): 2'-deoxy-2'Fluoro
cucgcaagacccuaucaggc

SEQ ID NO: 2150 - DNA, 18 bp, Artificial Sequence
  Description of Artificial Sequence: neo-forward primer
ccggctacctgcccattc

SEQ ID NO: 2151 - DNA, 22 bp, Artificial Sequence
  Description of Artificial Sequence: neo-reverse primer
ccagatcatcctgatcgacaag

SEQ ID NO: 2152 - DNA, 24 bp, Artificial Sequence
  Description of Artificial Sequence: neo-probe
  misc_feature (1)..(1): 5' covalently linked reported dye FAM
  misc_feature (24)..(24): 3' conjugated quencher dye TAMARA
acatcgcatcgagcgagcacgtac

SEQ ID NO: 2153 - DNA, 24 bp, Artificial Sequence
  Description of Artificial Sequence: 36B4 forward primer
tctatcatcaacgggtacaaacga

SEQ ID NO: 2154 - DNA, 22 bp, Artificial Sequence
  Description of Artificial Sequence: 36B4- reverse primer
cttttcagcaagtgggaaggtg

SEQ ID NO: 2155 - DNA, 27 bp, Artificial Sequence
  Description of Artificial Sequence: 36B4 probe
  misc_feature (1)..(1): 5' covalently linked reported dye VIC
  misc_feature (27)..(27): 3' conjugated quencher dye TAMARA
cctggccttgtctgtggagacggatta

SEQ ID NO: 2156 - DNA, 21 bp, Artificial Sequence
  Description of Artificial Sequence:  siNA sense region
  misc_feature (1)..(1): 5'-3 attached terminal deoxyabasic moeity inverted abasic, inverted nucleotide or other terminal cap that is optionally present
  misc_feature (21)..(21): 3'-3 attached terminal deoxyabasic moeity inverted abasic, inverted nucleotide or other terminal cap that is optionally present
  misc_feature (20)..(21): n stands for any nucleotide
  misc_feature (1)..(19): ribonucleotide unmodified or modified as described for this sequence
nnnnnnnnnnnnnnnnnnnnn

SEQ ID NO: 2157 - DNA, 21 bp, Artificial Sequence
  Description of Artificial Sequence:  siNA antisense region
  misc_feature (20)..(20): Phosphorothioate or Phosphorodithioate 3'-Internucleotide Linkage (optionally present)
  misc_feature (20)..(21): n stands for any nucleotide
  misc_feature (21)..(21): attached terminal glyceryl moeity or 3'-3 attached inverted deoxyabasic (optionally present)
  misc_feature (1)..(19): ribonucleotide unmodified or modified as described for this sequence
nnnnnnnnnnnnnnnnnnnnn

SEQ ID NO: 2158 - DNA, 21 bp, Artificial Sequence
  Description of Artificial Sequence:  siNA sense region
  misc_feature (1)..(19): n stands for any ribonucleotide wherein any pyrimidine nucleotide present is 2'-OCF3 or 2'-Fluoro and all purine nucleotide is 2'-O-methyl
  misc_feature (20)..(20): Phosphorothioate or Phosphorodithioate 3'-Internucleotide Linkage (optionally present)
  misc_feature (20)..(21): n stands for any nucleotide
nnnnnnnnnnnnnnnnnnnnn

SEQ ID NO: 2159 - DNA, 21 bp, Artificial Sequence
  Description of Artificial Sequence:  siNA antisense region
  misc_feature (1)..(19): n stands for any ribonucleotide wherein any pyrimidine nucleotide present is 2'-OCF3 or 2'-Fluoro and all purine nucleotides are 2'-o-methyl
  misc_feature (20)..(20): Phosphorothioate or Phosphorodithioate 3'-Internucleotide Linkage (optionally present)
  misc_feature (20)..(21): n stands for any nucleotide
  misc_feature (21)..(21): attached terminal glyceryl moeity or 3'-3 attached inverted deoxyabasic (optionally present)
nnnnnnnnnnnnnnnnnnnnn

SEQ ID NO: 2160 - DNA, 21 bp, Artificial Sequence
  Description of Artificial Sequence:  siNA sense region
  misc_feature (1)..(19): n stands for any ribonucleotide wherein any pyrimidine nucleotide present is 2'-OCF3 or 2'-Fluoro
  misc_feature (20)..(21): n stands for any nucleotide
  misc_feature (1)..(1): 5'-3 attached terminal deoxyabasic moeity, inverted abasic, inverted nucleotide or other terminal cap that is optionally present
  misc_feature (21)..(21): 3'-3 attached terminal deoxyabasic moeity, inverted abasic, inverted nucleotide or other terminal cap that is optionally present
nnnnnnnnnnnnnnnnnnnnn

SEQ ID NO: 2161 - DNA, 21 bp, Artificial Sequence
  Description of Artificial Sequence:  siNA antisense region
  misc_feature (1)..(19): n stands for any ribonucleotide wherein any pyrimidine nucleotide present is 2'-OCF3 or 2'-Fluoro
  misc_feature (20)..(20): Phosphorothioate or Phosphorodithioate 3'-Internucleotide Linkage (optionally present)
  misc_feature (20)..(21): n stands for any nucleotide
  misc_feature (21)..(21): attached terminal glyceryl moeity or 3'-3 attached inverted deoxyabasic (optionally present)
nnnnnnnnnnnnnnnnnnnnn

SEQ ID NO: 2162 - DNA, 21 bp, Artificial Sequence
  Description of Artificial Sequence:  siNA sense region
  misc_feature (1)..(19): n stands for any ribonucleotide wherein any pyrimidine nucleotide present is 2'-OCF3 or 2'-Fluoro and any purine nucleotide present is 2'-Deoxy
  misc_feature (20)..(21): n stands for any nucleotide
  misc_feature (1)..(1): 5'-3 attached terminal deoxyabasic moeity, inverted abasic, inverted nucleotide or other terminal cap that is optionally present
  misc_feature (21)..(21): 3'-3 attached terminal deoxyabasic moeity, inverted abasic, inverted nucleotide or other terminal cap that is optionally present
nnnnnnnnnnnnnnnnnnnnn

SEQ ID NO: 2163 - DNA, 21 bp, Artificial Sequence
  Description of Artificial Sequence:  siNA sense region
  misc_feature (1)..(19): n stands for any ribonucleotide wherein any pyrimidine nucleotide present is 2'-Fluoro or 2'-OCF3 and any purine in 2'-deoxy
  misc_feature (20)..(21): n stands for any nucleotide
  misc_feature (21)..(21): attached terminal glyceryl moeity or 3'-3 attached inverted deoxyabasic (optionally present)
nnnnnnnnnnnnnnnnnnnnn

SEQ ID NO: 2164 - DNA, 21 bp, Artificial Sequence
  Description of Artificial Sequence:  siNA sense region
  misc_feature (1)..(1): 5'-3 attached terminal deoxyabasic moeity, inverted abasic, inverted nucleotide or other terminal cap that is optionally present
  misc_feature (21)..(21): 3'-3 attached terminal deoxyabasic moeity, inverted abasic, inverted nucleotide or other terminal cap that is optionally present
  misc_feature (1)..(19): ribonucleotide unmodified or modified as described for this sequence
gcgggccuugccuacuauutt

SEQ ID NO: 2165 - DNA, 21 bp, Artificial Sequence
  Description of Artificial Sequence:  siNA antisense region
  misc_feature (20)..(20): Phosphorothioate or Phosphorodithioate 3'-Internucleotide Linkage (optionally present)
  misc_feature (1)..(19): ribonucleotide unmodified or modified as described for this sequence
  misc_feature (21)..(21): attached terminal glyceryl moeity or 3'-3 attached inverted deoxyabasic (optionally present)
aauaguaggcaaggcccgctt

SEQ ID NO: 2166 - DNA, 21 bp, Artificial Sequence
  Description of Artificial Sequence:  siNA sense region
  misc_feature (1)..(1): 2'-O-Methyl
  misc_feature (3)..(5): 2'-O-Methyl
  misc_feature (10)..(10): 2'-O-Methyl
  misc_feature (14)..(14): 2'-O-Methyl
  misc_feature (17)..(17): 2'-O-Methyl
  misc_feature (2)..(2): 2'-deoxy-2'-Fluoro or 2'-OCF3
  misc_feature (6)..(9): 2'-deoxy-2'-Fluoro or 2'-OCF3
  misc_feature (11)..(13): 2'-deoxy-2'-Fluoro or 2'-OCF3
  misc_feature (15)..(16): 2'-deoxy-2'-Fluoro or 2'-OCF3
  misc_feature (18)..(19): 2'-deoxy-2'-Fluoro or 2'-OCF3
  misc_feature (1)..(19): ribonucleotide unmodified or modified as described for this sequence
  misc_feature (20)..(20): Phosphorothioate or Phosphorodithioate 3'-Internucleotide Linkage (optionally present)
gcgggccuugccuacuauutt

SEQ ID NO: 2167 - DNA, 21 bp, Artificial Sequence
  Description of Artificial Sequence:  siNA antisense region
  misc_feature (1)..(2): 2'-O-Methyl
  misc_feature (4)..(5): 2'-O-Methyl
  misc_feature (7)..(9): 2'-O-Methyl
  misc_feature (11)..(14): 2'-O-Methyl
  misc_feature (18)..(18): 2'-O-Methyl
  misc_feature (3)..(3): 2'-deoxy-2'-Fluoro or 2'-OCF3
  misc_feature (6)..(6): 2'-deoxy-2'-Fluoro or 2'-OCF3
  misc_feature (10)..(10): 2'-deoxy-2'-Fluoro or 2'-OCF3
  misc_feature (15)..(17): 2'-deoxy-2'-Fluoro or 2'-OCF3
  misc_feature (19)..(19): 2'-deoxy-2'-Fluoro or 2'-OCF3
  misc_feature (20)..(20): Phosphorothioate or Phosphorodithioate 3'-Internucleotide Linkage (optionally present)
  misc_feature (1)..(19): ribonucleotide unmodified or modified as described for this sequence
  misc_feature (21)..(21): attached terminal glyceryl moeity or 3'-3 attached inverted deoxyabasic (optionally present)
aauaguaggcaaggcccgctt

SEQ ID NO: 2168 - DNA, 21 bp, Artificial Sequence
  Description of Artificial Sequence:  siNA sense region
  misc_feature (2)..(2): 2'-OCF3 or 2'-deoxy-2'-Fluoro
  misc_feature (6)..(9): 2'-OCF3 or 2'-deoxy-2'-Fluoro
  misc_feature (11)..(13): 2'-OCF3 or 2'-deoxy-2'-Fluoro
  misc_feature (15)..(16): 2'-OCF3 or 2'-deoxy-2'-Fluoro
  misc_feature (18)..(19): 2'-OCF3 or 2'-deoxy-2'-Fluoro
  misc_feature (1)..(1): 5'-3 attached terminal deoxyabasic moeity, inverted abasic, inverted nucleotide or other terminal cap that is optionally present
  misc_feature (21)..(21): 3'-3 attached terminal deoxyabasic moeity, inverted abasic, inverted nucleotide or other terminal cap that is optionally present
  misc_feature (1)..(19): ribonucleotide unmodified or modified as described for this sequence
gcgggccuugccuacuauutt

SEQ ID NO: 2169 - DNA, 21 bp, Artificial Sequence
  Description of Artificial Sequence:  siNA antisense region
  misc_feature (3)..(3): 2'-OCF3 or 2'-deoxy-2'-Fluoro
  misc_feature (6)..(6): 2'-OCF3 or 2'-deoxy-2'-Fluoro
  misc_feature (10)..(10): 2'-OCF3 or 2'-deoxy-2'-Fluoro
  misc_feature (15)..(17): 2'-OCF3 or 2'-deoxy-2'-Fluoro
  misc_feature (19)..(19): 2'-OCF3 or 2'-deoxy-2'-Fluoro
  misc_feature (1)..(19): ribonucleotide unmodified or modified as described for this sequence
  misc_feature (20)..(20): Phosphorothioate or Phosphorodithioate 3'-Internucleotide Linkage (optionally present)
  misc_feature (21)..(21): attached terminal glyceryl moeity or 3'-3 attached inverted deoxyabasic (optionally present)
aauaguaggcaaggcccgctt

SEQ ID NO: 2170 - DNA, 21 bp, Artificial Sequence
  Description of Artificial Sequence:  siNA sense region
  misc_feature (1)..(1): 2'-deoxy
  misc_feature (3)..(5): 2'-deoxy
  misc_feature (10)..(10): 2'-deoxy
  misc_feature (14)..(14): 2'-deoxy
  misc_feature (17)..(17): 2'-deoxy
  misc_feature (2)..(2): 2'-OCF3 or 2'-deoxy-2'-Fluoro
  misc_feature (6)..(9): 2'-OCF3 or 2'-deoxy-2'-Fluoro
  misc_feature (11)..(13): 2'-OCF3 or 2'-deoxy-2'-Fluoro
  misc_feature (15)..(16): 2'-OCF3 or 2'-deoxy-2'-Fluoro
  misc_feature (18)..(19): 2'-OCF3 or 2'-deoxy-2'-Fluoro
  misc_feature (1)..(1): 5'-3 attached terminal deoxyabasic moeity, inverted abasic, inverted nucleotide or other terminal cap that is optionally present
  misc_feature (21)..(21): 3'-3 attached terminal deoxyabasic moeity, inverted abasic, inverted nucleotide or other terminal cap that is optionally present
  misc_feature (1)..(19): ribonucleotide unmodified or modified as described for this sequence
gcgggccuugccuacuauutt

SEQ ID NO: 2171 - DNA, 21 bp, Artificial Sequence
  Description of Artificial Sequence:  siNA sense region
  misc_feature (2)..(2): 2'-OCF3 or 2'-deoxy-2'-Fluoro
  misc_feature (6)..(9): 2'-OCF3 or 2'-deoxy-2'-Fluoro
  misc_feature (11)..(13): 2'-OCF3 or 2'-deoxy-2'-Fluoro
  misc_feature (15)..(16): 2'-OCF3 or 2'-deoxy-2'-Fluoro
  misc_feature (18)..(19): 2'-OCF3 or 2'-deoxy-2'-Fluoro
  misc_feature (1)..(1): 5'-3 attached terminal deoxyabasic moeity, inverted abasic, inverted nucleotide or other terminal cap that is optionally present
  misc_feature (21)..(21): 3'-3 attached terminal deoxyabasic moeity, inverted abasic, inverted nucleotide or other terminal cap that is optionally present
  misc_feature (1)..(19): ribonucleotide unmodified or modified as described for this sequence
aauaguaggcaaggcccgctt

SEQ ID NO: 2172 - DNA, 21 bp, Artificial Sequence
  Description of Artificial Sequence:  siNA sense region
  misc_feature (1)..(2): 2'-deoxy
  misc_feature (4)..(5): 2'-deoxy
  misc_feature (7)..(9): 2'-deoxy
  misc_feature (11)..(14): 2'-deoxy
  misc_feature (18)..(18): 2'-deoxy
  misc_feature (3)..(3): 2'-OCF3 or 2'-deoxy-2'-Fluoro
  misc_feature (6)..(6): 2'-OCF3 or 2'-deoxy-2'-Fluoro
  misc_feature (10)..(10): 2'-OCF3 or 2'-deoxy-2'-Fluoro
  misc_feature (15)..(17): 2'-OCF3 or 2'-deoxy-2'-Fluoro
  misc_feature (19)..(19): 2'-OCF3 or 2'-deoxy-2'-Fluoro
  misc_feature (21)..(21): 3'-3 attached terminal deoxyabasic moeity, inverted abasic, inverted nucleotide or other terminal cap that is optionally present
  misc_feature (20)..(20): Phosphorothioate or Phosphorodithioate 3'-Internucleotide Linkage (optionally present)
  misc_feature (1)..(19): ribonucleotide unmodified or modified as described for this sequence
aauaguaggcaaggcccgctt

SEQ ID NO: 2173 - RNA, 14 nt, Artificial Sequence
  Description of Artificial Sequence:  Target Sequence/duplex forming oligonucleotide
auauaucuauuucg

SEQ ID NO: 2174 - RNA, 14 nt, Artificial Sequence
  Description of Artificial Sequence:  Complementary Sequence/duplex forming oligonucleotide
cgaaauagauauau

SEQ ID NO: 2175 - RNA, 23 nt, Artificial Sequence
  Description of Artificial Sequence:  Self Complementary duplex construct
cgaaaauagauauaucuauuucg

SEQ ID NO: 2176 - DNA, 24 bp, Artificial Sequence
  Description of Artificial Sequence:  Duplex forming oligonucleotide
  misc_feature (1)..(22): ribonucleotide unmodified or modified as described for this sequence
cgaaauagauauaucuauuucgtt
